(19) United States
(12) Patent Application Publication
(10) Pub. No.: US 2022/0313813 A1
(43) Pub. Date: Oct. 6, 2022

(54) ROTAVIRUS MRNA VACCINE

(71) Applicant: CureVac AG, Tübingen (DE)

(72) Inventors: Susanne RAUCH, Tübingen (DE); Sandro ROIER, Tübingen (DE); Benjamin PETSCH, Tübingen (DE)

(73) Assignee: CureVac AG, Tübingen (DE)

(21) Appl. No.: 17/620,047

(22) PCT Filed: Jun. 18, 2020
(86) PCT No.: PCT/EP2020/067036

§ 371 Date: Dec. 16, 2021

(30) Foreign Application Priority Data
Jun. 18, 2019 (EP) PCT/EP2019/066107

(51) Int. Cl. A61K 39/15; C12N 7/00; C07K 14/005; A61K 39/145; A61P 31/14

(52) U.S. Cl. CPC A61K 39/15; C12N 7/00; C07K 14/005; A61K 39/145; A61P 31/14; C12N 2720/12334; A61K 2039/53

(57) ABSTRACT

The invention is directed to a coding RNA for a Rotavirus vaccine. The coding RNA comprises at least one coding region encoding at least one antigenic peptide or protein of a Rotavirus, in particular VPS* of a Rotavirus, or immunogenic fragment or immunogenic variant thereof. The present invention is also directed to compositions and vaccines comprising said coding RNA in association with a polymeric carrier, a polycationic protein or peptide, or a lipid nanoparticle (LNP). Further, the invention concerns a kit, particularly a kit of parts comprising the coding RNA, or the composition, or the vaccine. The invention is also directed to a kit or kit of parts, medical treatments, and the first and second medical uses.

### INTRODUCTION

[0001] The present invention is directed to a coding RNA for a Rotavirus vaccine. The coding RNA comprises at least one heterologous untranslated region (UTR), preferably a 3′-UTR and/or a 5′-UTR, and a coding region (cds) encoding at least one antigenic peptide or protein of a Rotavirus, in particular at least one antigenic protein derived from VP8* of a Rotavirus. The present invention is also directed to compositions and vaccines comprising at least one of said coding RNAs in association with a polymeric carrier, a polycationic protein or peptide, or a lipid nanoparticle (LNP). Further, the invention concerns a kit, particularly a kit of parts comprising the coding RNA, or the composition, or the vaccine. The invention is also directed to first and second medical uses of the coding RNA, the composition, the vaccine, and the kit, and to methods of treating or preventing a Rotavirus infection.

[0002] Rotavirus infections are the globally leading cause of severe diarrhoea in children younger than five years of age and account for 50% of hospitalisations for childhood diarrhoea. Worldwide more than 450,000 children under five years die from rotavirus infection each year. While Rotavirus is endemic worldwide with almost every child having been infected by the age of five, Rotavirus infection is most problematic in the developing world: the majority of deaths occur in Africa and Asia, of which India is the country most heavily affected.

[0003] At present, there are two licensed oral vaccines available, which are both based on live-attenuated forms of the virus. RotaTeq® (Merck) is based on a bovine Rotavirus strain engineered to express outer layer proteins from human strains. Rotarix® (GlaxoSmithKline) is based on a live-attenuated human Rotavirus strain. Both vaccines are given orally and exhibit high efficacy in the developed world. However, the efficacy of oral Rotavirus vaccination is significantly reduced in developing countries. This is likely to be caused by several factors. Firstly, the virus-based vaccine can be inactivated by pre-existing antibodies, e.g. transferred to babies by breastfeeding. Secondly, malnutrition can have a negative impact on the efficacy of oral vaccinations. Furthermore, unrelated infections of the gastrointestinal tract which are more prevalent in developing countries compared to developed countries, might be a major factor in reducing vaccine efficacy. In addition, an increased risk of intussuseption has been described for live-attenuated oral rotavirus vaccines in the past.

[0004] PATH (an international nonprofit organization) is currently investigating non-replicating rotavirus vaccine (NRRV) candidates that may eliminate the risk of intussusception completely. NRRVs that would be administered via non-oral routes may overcome factors that can lessen an oral vaccine's impact including co-infections in the digestive system or the presence of maternally-derived antibodies (Wen, Xiaobo, et at. “Inclusion of a universal tetanus toxoid CD4+ T cell epitope P2 significantly enhanced the immunogenicity of recombinant rotavirus ΔVP8* subunit parenteral vaccines.” Vaccine 32.35 (2014): 4420-4427). The employed antigen design P2-VP8* (P2 is a T cell epitope derived from the tetanus toxoid) has successfully been tested as a protein subunit vaccine in guinea pigs and gnotobiotic pigs and is currently been tested in clinical trials (Groome, Michelle J., et al. “Safety and immunogenicity of a parenteral P2-VP8-P [8] subunit rotavirus vaccine in toddlers and infants in South Africa: a randomised, double-blind, placebo-controlled trial.” The Lancet Infectious Diseases 17.8 (2017): 843-853).

[0005] Potential disadvantages of subunit vaccines may be that they generally require strong adjuvants (e.g. aluminium hydroxide) and these adjuvants often induce tissue reactions, the duration of immunity is generally shorter than live vaccines and that they often need to be linked to carriers to enhance their immunogenicity. Furthermore a pathogen can escape immune responses to a single epitope versus multiple epitope vaccines.

[0006] Although live oral rotavirus vaccines have been shown to provide protection against rotavirus gastroenteritis caused by rotavirus strains with and without G and P genotypes shared with the vaccine strain, this crossprotection might not occur with subunit vaccines, and a multivalent vaccine with P[4], P[6], and P[8] antigens might be required to provide protection against the common circulating rotavirus strains. Therefore, Groome et al are undertaking a multicentre study to investigate the safety and immunogenicity of a trivalent P2-VP8-P[4/6/8] vaccine (Groome, Michelle J., et al. “Safety and immunogenicity of a parenteral P2-VP8-P [8] subunit rotavirus vaccine in toddlers and infants in South Africa: a randomised, double-blind, placebo-controlled trial.” The Lancet Infectious Diseases 17.8 (2017): 843-853).

[0007] Accordingly, there is an urgent need for providing new and improved vaccines, which would be of particular importance for developing countries. Preferably, the new and improved vaccine should allow parenteral, e.g. intramuscular delivery, and thus avoid efficacy reduction induced via oral vaccine delivery. Moreover, the new vaccine should allow cost-effective production. Furthermore, especially for the use in developing countries, there is a need for a temperature stabile Rotavirus vaccine which is not dependent on cooling for storage and distribution.

[0008] The objects underlying the present invention are inter alia solved by providing a coding RNA for a Rotavirus vaccine or an RNA based composition/vaccine as further defined in the claims and the description. Further, it would be desirable that such a coding RNA, or a composition/vaccine comprising said coding RNA has at least some of the following advantageous features:
[0009] Improved translation of coding RNA constructs at the site of injection (e.g. muscle);
[0010] Very efficient induction of antigen-specific immune responses against the encoded Rotavirus protein at a very low dosages and dosing regimen;
[0011] Suitability for vaccination of infants and/or newborns;
[0012] Suitability for intramuscular administration;
[0013] Induction of specific and functional humoral immune response against Rotavirus;
[0014] Induction of broad, functional cellular T-cell responses against Rotavirus;
[0015] Induction of specific B-cell memory against Rotavirus;
[0016] Induction of specific immunoglobulin A (IgA) antibodies;
[0017] Fast onset of immune protection against Rotavirus;
[0018] Longevity of the induced immune responses against Rotavirus;
[0019] Induction of high levels of virus neutralizing antibodies to prevent a Rotavirus infection,
[0020] Induction of high levels of virus neutralizing antibodies against homologous and heterologous Rotavirus strains;
[0021] No excessive induction of systemic cytokine or chemokine response after application of the vaccine; which could lead to an undesired high reactogenicity upon vaccination
[0022] Well tolerability, no side-effects, non-toxicity of the vaccine;
[0023] Advantageous stability characteristics of the RNA-based vaccine;
[0024] Speed, adaptability, simplicity and scalability of Rotavirus vaccine production;
[0025] Advantageous vaccination regimen that only requires one or two vaccination for sufficient protection.

### Definitions

[0026] For the sake of clarity and readability the following definitions are provided. Any technical feature mentioned for these definitions may be read on each and every embodiment of the invention. Additional definitions and explanations may be specifically provided in the context of these embodiments.

[0027] Percentages in the context of numbers should be understood as relative to the total number of the respective items. In other cases, and unless the context dictates otherwise, percentages should be understood as percentages by weight (wt.-%).

[0028] About: The term “about” is used when determinants or values do not need to be identical, i.e. 100% the same. Accordingly, “about” means, that a determinant or values may diverge by 0.1% to 20%, preferably by 0.1% to 10%; in particular, by 0.5%, 1%, 2%, 3%, 4%, 5%, 6%, 7%, 8%, 9%, 10%, 11%, 12%, 13%, 14%, 15%, 16%, 17%, 18%, 19%, 20%. The skilled person will know that e.g. certain parameters or determinants may slightly vary based on the method how the parameter was determined. For example, if a certain determinants or value is defined herein to have e.g. a length of “about 1000 nucleotides”, the length may diverge by 0.1% to 20%, preferably by 0.1% to 10%; in particular, by 0.5%, 1%, 2%, 3%, 4%, 5%, 6%, 7%, 8%, 9%, 10%, 11%, 12%, 13%, 14%, 15%, 16%, 17%, 18%, 19%, 20%. Accordingly, the skilled person will know that in that specific example, the length may diverge by 1 to 200 nucleotides, preferably by 1 to 200 nucleotides; in particular, by 5, 10, 20, 30, 40, 50, 60, 70, 80, 90, 100, 110, 120, 130, 140, 150, 160, 170, 180, 190, 200 nucleotides.

[0029] Adaptive immune response: The term “adaptive immune response” as used herein will be recognized and understood by the person of ordinary skill in the art, and is e.g. intended to refer to an antigen-specific response of the immune system (the adaptive immune system). Antigen specificity allows for the generation of responses that are tailored to specific pathogens or pathogen-infected cells. The ability to mount these tailored responses is usually maintained in the body by “memory cells” (B-cells). In the context of the invention, the antigen is provided by the coding RNA encoding at least one antigenic peptide or protein derived from Rotavirus.

[0030] Antigen: The term “antigen” as used herein will be recognized and understood by the person of ordinary skill in the art, and is e.g. intended to refer to a substance which may be recognized by the immune system, preferably by the adaptive immune system, and is capable of triggering an antigen-specific immune response, e.g. by formation of antibodies and/or antigen-specific T cells as part of an adaptive immune response. Typically, an antigen may be or may comprise a peptide or protein which may be presented by the MHC to T-cells. Also fragments, variants and derivatives of peptides or proteins derived from e.g. VP8* comprising at least one epitope are understood as antigens in the context of the invention. In the context of the present invention, an antigen may be the product of translation of a provided mRNA as specified herein.

[0031] Antigenic peptide or protein: The term “antigenic peptide or protein” or “immunogenic peptide or protein” will be recognized and understood by the person of ordinary skill in the art, and is e.g. intended to refer to a peptide, protein derived from a (antigenic or immunogenic) protein which stimulates the body's adaptive immune system to provide an adaptive immune response. Therefore an antigenic/immunogenic peptide or protein comprises at least one epitope (as defined herein) or antigen (as defined herein) of the protein it is derived from (e.g., VP8* of a Rotavirus).

[0032] Cationic: Unless a different meaning is clear from the specific context, the term “cationic” means that the respective structure bears a positive charge, either permanently or not permanently, but in response to certain conditions such as pH. Thus, the term “cationic” covers both “permanently cationic” and “cationisable”.

[0033] Cationisable: The term “cationisable” as used herein means that a compound, or group or atom, is positively charged at a lower pH and uncharged at a higher pH of its environment. Also in non-aqueous environments where no pH value can be determined, a cationisable compound, group or atom is positively charged at a high hydrogen ion concentration and uncharged at a low concentration or activity of hydrogen ions. It depends on the individual properties of the cationisable or polycationisable compound, in particular the pKa of the respective cationisable group or atom, at which pH or hydrogen ion concentration it is charged or uncharged. In diluted aqueous environments, the fraction of cationisable compounds, groups or atoms bearing a positive charge may be estimated using the so-called Henderson-Hasselbalch equation which is well-known to a person skilled in the art. E.g., in some embodiments, if a compound or moiety is cationisable, it is preferred that it is positively charged at a pH value of about 1 to 9, preferably 4 to 9, 5 to 8 or even 6 to 8, more preferably of a pH value of or below 9, of or below 8, of or below 7, most preferably at physiological pH values, e.g. about 7.3 to 7.4, i.e. under physiological conditions, particularly under physiological salt conditions of the cell in vivo. In other embodiments, it is preferred that the cationisable compound or moiety is predominantly neutral at physiological pH values, e.g. about 7.0-7.4, but becomes positively charged at lower pH values. In some embodiments, the preferred range of pKa for the cationisable compound or moiety is about 5 to about 7.

[0034] Coding sequence/coding region: The terms “coding sequence” or “coding region” and the corresponding abbreviation “cds” as used herein will be recognized and understood by the person of ordinary skill in the art, and are e.g. intended to refer to a sequence of several nucleotide triplets, which may be translated into a peptide or protein. A coding sequence in the context of the present invention is preferably an RNA sequence, consisting of a number of nucleotides that may be divided by three, which starts with a start codon and which preferably terminates with a stop codon. A cds is preferably a part of the coding RNA.

[0035] Derived from: The term “derived from” as used throughout the present specification in the context of a nucleic acid, i.e. for a nucleic acid “derived from” (another) nucleic acid, means that the nucleic acid, which is derived from (another) nucleic acid, shares e.g. at least 60%, 70%, 80%, 81%, 82%, 83%, 84%, 85%, 86%, 87%, 88%, 89%, 90%, 91%, 92%, 93%, 94%, 95%, 96%, 97%, 98%, or 99% sequence identity with the nucleic acid from which it is derived. The skilled person is aware that sequence identity is typically calculated for the same types of nucleic acids, i.e. for DNA sequences or for RNA sequences. Thus, it is understood, if a DNA is “derived from” an RNA or if an RNA is “derived from” a DNA, in a first step the RNA sequence is converted into the corresponding DNA sequence (in particular by replacing the uracils (U) by thymidines (T) throughout the sequence) or, vice versa, the DNA sequence is converted into the corresponding RNA sequence (in particular by replacing the T by U throughout the sequence). Thereafter, the sequence identity of the DNA sequences or the sequence identity of the RNA sequences is determined. Preferably, a nucleic acid “derived from” a nucleic acid also refers to nucleic acid, which is modified in comparison to the nucleic acid from which it is derived, e.g. in order to increase RNA stability even further and/or to prolong and/or increase protein production. In the context of amino acid sequences (e.g. antigenic peptides or proteins) the term “derived from” means that the amino acid sequence, which is derived from (another) amino acid sequence, shares e.g. at least 60%, 70%, 75%, 80%, 81%, 82%, 83%, 84%, 85%, 86%, 87%, 88%, 89%, 90%, 91%, 92%, 93%, 94%, 95%, 96%, 97%, 98%, or 99% sequence identity with the amino acid sequence from which it is derived.

[0036] Epitope: The term “epitope” (also called “antigen determinant” in the art) as used herein will be recognized and understood by the person of ordinary skill in the art, and is e.g. intended to refer to T cell epitopes and B cell epitopes. T cell epitopes or parts of the antigenic peptides or proteins may comprise fragments preferably having a length of about 6 to about 20 or even more amino acids, e.g. fragments as processed and presented by MHC class I molecules, preferably having a length of about 8 to about 10 amino acids, e.g. 8, 9, or 10, (or even 11, or 12 amino acids), or fragments as processed and presented by MHC class II molecules, preferably having a length of about 13 to about 20 or even more amino acids. These fragments are typically recognized by T cells in form of a complex consisting of the peptide fragment and an MHC molecule, i.e. the fragments are typically not recognized in their native form. B cell epitopes are typically fragments located on the outer surface of (native) protein or peptide antigens, preferably having 5 to 15 amino acids, more preferably having 5 to 12 amino acids, even more preferably having 6 to 9 amino acids, which may be recognized by antibodies, i.e. in their native form. Such epitopes of proteins or peptides may furthermore be selected from any of the herein mentioned variants of such proteins or peptides. In this context epitopes can be conformational or discontinuous epitopes which are composed of segments of the proteins or peptides as defined herein that are discontinuous in the amino acid sequence of the proteins or peptides as defined herein but are brought together in the three-dimensional structure or continuous or linear epitopes which are composed of a single polypeptide chain.

[0037] Fragment: The term “fragment” as used throughout the present specification in the context of a nucleic acid sequence (e.g. RNA sequence) or an amino acid sequence may typically be a shorter portion of a full-length sequence of e.g. a nucleic acid sequence or an amino acid sequence. Accordingly, a fragment, typically, consists of a sequence that is identical to the corresponding stretch within the full-length sequence. A preferred fragment of a sequence in the context of the present invention, consists of a continuous stretch of entities, such as nucleotides or amino acids corresponding to a continuous stretch of entities in the molecule the fragment is derived from, which represents at least 40%, 50%, 60%, 70%, 80%, 90%, 95% of the total (i.e. full-length) molecule from which the fragment is derived (e.g. VP8* of a Rotavirus). The term “fragment” as used throughout the present specification in the context of proteins or peptides may, typically, comprise a sequence of a protein or peptide as defined herein, which is, with regard to its amino acid sequence, N-terminally and/or C-terminally truncated compared to the amino acid sequence of the original protein. Such truncation may thus occur either on the amino acid level or correspondingly on the nucleic acid level. A sequence identity with respect to such a fragment as defined herein may therefore preferably refer to the entire protein or peptide as defined herein or to the entire (coding) nucleic acid molecule of such a protein or peptide. Fragments of proteins or peptides may comprise at least one epitope of those proteins or peptides.

[0038] Heterologous: The terms “heterologous” or “heterologous sequence” as used throughout the present specification in the context of a nucleic acid sequence or an amino acid sequence refers to a sequence (e.g. RNA, amino acid) will be recognized and understood by the person of ordinary skill in the art, and is intended to refer to a sequence that is derived from another gene, from another allele, from another species. Two sequences are typically understood to be “heterologous” if they are not derivable from the same gene or in the same allele. I.e., although heterologous sequences may be derivable from the same organism, they naturally (in nature) do not occur in the same RNA molecule or protein.

[0039] Humoral immune response: The terms “humoral immunity” or “humoral immune response” will be recognized and understood by the person of ordinary skill in the art, and are e.g. intended to refer to B-cell mediated antibody production and optionally to accessory processes accompanying antibody production. A humoral immune response may be typically characterized, e.g. by Th2 activation and cytokine production, germinal center formation and isotype switching, affinity maturation and memory cell generation. Humoral immunity may also refer to the effector functions of antibodies, which include pathogen and toxin neutralization, classical complement activation, and opsonin promotion of phagocytosis and pathogen elimination.

[0040] Identity (of a sequence): The term “identity” as used throughout the present specification in the context of a nucleic acid sequence or an amino acid sequence will be recognized and understood by the person of ordinary skill in the art, and is e.g. intended to refer to the percentage to which two sequences are identical. To determine the percentage to which two sequences are identical, e.g. nucleic acid sequences or amino acid (aa) sequences as defined herein, preferably the aa sequences encoded by the nucleic acid sequence as defined herein or the aa sequences themselves, the sequences can be aligned in order to be subsequently compared to one another. Therefore, e.g. a position of a first sequence may be compared with the corresponding position of the second sequence. If a position in the first sequence is occupied by the same residue as is the case at a position in the second sequence, the two sequences are identical at this position. If this is not the case, the sequences differ at this position. If insertions occur in the second sequence in comparison to the first sequence, gaps can be inserted into the first sequence to allow a further alignment. If deletions occur in the second sequence in comparison to the first sequence, gaps can be inserted into the second sequence to allow a further alignment. The percentage to which two sequences are identical is then a function of the number of identical positions divided by the total number of positions including those positions which are only occupied in one sequence. The percentage to which two sequences are identical can be determined using an algorithm, e.g. an algorithm integrated in the BLAST program.

[0041] Immunogen, immunogenic: The terms “immunogen” or “immunogenic” will be recognized and understood by the person of ordinary skill in the art, and are e.g. intended to refer to a compound that is able to stimulate/induce an immune response. Preferably, an immunogen is a peptide, polypeptide, or protein. An immunogen in the sense of the present invention is the product of translation of a provided mRNA, comprising at least one coding sequence encoding at least one antigenic peptide, protein derived from VP8* as defined herein. Typically, an immunogen elicits an adaptive immune response.

[0042] Immune response: The term “immune response” will be recognized and understood by the person of ordinary skill in the art, and is e.g. intended to refer to a specific reaction of the adaptive immune system to a particular antigen (so called specific or adaptive immune response) or an unspecific reaction of the innate immune system (so called unspecific or innate immune response), or a combination thereof.

[0043] Immune system: The term “immune system” will be recognized and understood by the person of ordinary skill in the art, and is e.g. intended to refer to a system of the organism that may protect the organisms from infection. If a pathogen succeeds in passing a physical barrier of an organism and enters this organism, the innate immune system provides an immediate, but non-specific response. If pathogens evade this innate response, vertebrates possess a second layer of protection, the adaptive immune system. Here, the immune system adapts its response during an infection to improve its recognition of the pathogen. This improved response is then retained after the pathogen has been eliminated, in the form of an immunological memory, and allows the adaptive immune system to mount faster and stronger attacks each time this pathogen is encountered. According to this, the immune system comprises the innate and the adaptive immune system. Each of these two parts typically contains so called humoral and cellular components.

[0044] Innate immune system: The term “innate immune system” (also known as non-specific or unspecific immune system) will be recognized and understood by the person of ordinary skill in the art, and is e.g. intended to refer to a system typically comprising the cells and mechanisms that defend the host from infection by other organisms in a non-specific manner. This means that the cells of the innate system may recognize and respond to pathogens in a generic way, but unlike the adaptive immune system, it does not confer long-lasting or protective immunity to the host. The innate immune system may be activated by ligands of pattern recognition receptor e.g. Toll-like receptors, NOD-like receptors, or RIG-1 like receptors etc.

[0045] Lipidoid compound: A lipidoid compound, also simply referred to as lipidoid, is a lipid-like compound, i.e. an amphiphilic compound with lipid-like physical properties. In the context of the present invention the term lipid is considered to encompass lipidoid compounds.

[0046] Monovalent vaccine, monovalent composition: The terms “monovalent vaccine”, “monovalent composition” “univalent vaccine” or “univalent composition” will be recognized and understood by the person of ordinary skill in the art, and are e.g. intended to refer to a composition or a vaccine comprising only one antigen or antigen construct from a pathogen. Accordingly, said vaccine or composition comprises only one coding RNA species encoding a single antigen or antigen construct of a single organism. The term “monovalent vaccine” includes the immunization against a single valence. In the context of the invention, a monovalent Rotavirus vaccine or composition would comprise an coding RNA encoding one single antigenic peptide or protein derived from VP8* of one specific Rotavirus.

[0047] Nucleic acid: The terms “nucleic acid” or “nucleic acid molecule” will be recognized and understood by the person of ordinary skill in the art. The term nucleic acid molecule preferably refers to DNA or RNA molecules. It is preferably used synonymous with the term polynucleotide. Preferably, a nucleic acid or a nucleic acid molecule is a polymer comprising or consisting of nucleotide monomers, which are covalently linked to each other by phosphodiester-bonds of a sugar/phosphate-backbone. The term “nucleic acid molecule” also encompasses modified nucleic acid molecules, such as base-modified, sugar-modified or backbone-modified DNA or RNA molecules as defined herein.

[0048] Nucleic acid sequence/RNA sequence/amino acid sequence: The terms “nucleic acid sequence”, “RNA sequence” or “amino acid sequence” will be recognized and understood by the person of ordinary skill in the art, and e.g. refer to a particular and individual order of the succession of its nucleotides or amino acids.

[0049] Permanently cationic: The term “permanently cationic” as used herein will be recognized and understood by the person of ordinary skill in the art, and means, e.g., that the respective compound, or group or atom, is positively charged at any pH value or hydrogen ion activity of its environment. Typically, the positive charge results from the presence of a quaternary nitrogen atom. Where a compound carries a plurality of such positive charges, it may be referred to as permanently polycationic, which is a subcategory of permanently cationic.

[0050] Polyvalent/multivalent vaccine, polyvalent/multivalent composition: The terms “polyvalent vaccine”, “polyvalent composition” “multivalent vaccine” or “multivalent composition” will be recognized and understood by the person of ordinary skill in the art, and are e.g. intended to refer to a composition or a vaccine comprising antigens from more than one Rotavirus, or comprising different antigens or antigen constructs of the same Rotavirus, or any combination thereof. The terms describe that said vaccine or composition has more than one valence. In the context of the invention, a polyvalent Rotavirus vaccine would comprise coding RNA encoding antigenic peptides or proteins derived from several different Rotaviruses or comprising coding RNA encoding different antigens or antigen constructs from the same Rotavirus, or a combination thereof. In preferred embodiment, a polyvalent Rotavirus vaccine or composition comprises more than one, preferably 2, 3, 4, 5 or even more different coding RNA species each encoding at least one peptide or protein of Rotavirus (e.g. different VP8* constructs). In particularly preferred embodiments, a polyvalent Rotavirus vaccine or composition is a trivalent Rotavirus vaccine or composition comprising 3 different coding RNA species each encoding VP8* (or a fragment of VP8*) derived from a different serotype (e.g. Serotype [P4], [P6], [P8])).

[0051] Stabilized RNA: The term “stabilized RNA” refer to an RNA that is modified such, that it is more stable to disintegration or degradation, e.g., by environmental factors or enzymatic digest, such as by exo- or endonuclease degradation, compared to an RNA without such modification. Preferably, a stabilized RNA in the context of the present invention is stabilized in a cell, such as a prokaryotic or eukaryotic cell, preferably in a mammalian cell, such as a human cell. The stabilization effect may also be exerted outside of cells, e.g. in a buffer solution etc., e.g., for storage of a composition comprising the stabilized RNA.

[0052] T-cell responses: The terms “cellular immunity” or “cellular immune response” or “cellular T-cell responses” as used herein will be recognized and understood by the person of ordinary skill in the art, and are for example intended to refer to the activation of macrophages, natural killer cells (NK), antigen-specific cytotoxic T-lymphocytes, and the release of various cytokines in response to an antigen. In more general terms, cellular immunity is not based on antibodies, but on the activation of cells of the immune system. Typically, a cellular immune response may be characterized e.g. by activating antigen-specific cytotoxic T-lymphocytes that are able to induce apoptosis in cells, e.g. specific immune cells like dendritic cells or other cells, displaying epitopes of foreign antigens on their surface (e.g. VP8*).

[0053] Variant (of a sequence): The term “variant” as used throughout the present specification in the context of a nucleic acid sequence will be recognized and understood by the person of ordinary skill in the art, and is e.g. intended to refer to a variant of a nucleic acid sequence derived from another nucleic acid sequence. E.g., a variant of a nucleic acid sequence may exhibit one or more nucleotide deletions, insertions, additions and/or substitutions compared to the nucleic acid sequence from which the variant is derived. A variant of a nucleic acid sequence may at least 50%, 60%, 70%, 80%, 90%, or 95% identical to the nucleic acid sequence the variant is derived from. The variant is a functional variant in the sense that the variant has retained at least 50%, 60%, 70%, 80%, 90%, or 95% or more of the function of the sequence where it is derived from. A “variant” of a nucleic acid sequence may have at least 70%, 75%, 80%, 85%, 90%, 95%, 98% or 99% nucleotide identity over a stretch of at least 10, 20, 30, 50, 75 or 100 nucleotide of such nucleic acid sequence.

[0054] The term “variant” as used throughout the present specification in the context of proteins or peptides is e.g. intended to refer to a proteins or peptide variant having an amino acid sequence which differs from the original sequence in one or more mutation(s)/substitution(s), such as one or more substituted, inserted and/or deleted amino acid(s). Preferably, these fragments and/or variants have the same, or a comparable specific antigenic property (immunogenic variants, antigenic variants). Insertions and substitutions are possible, in particular, at those sequence positions which cause no modification to the three-dimensional structure or do not affect the binding region. Modifications to a three-dimensional structure by insertion(s) or deletion(s) can easily be determined e.g. using CD spectra (circular dichroism spectra). A “variant” of a protein or peptide may have at least 70%, 75%, 80%, 85%, 90%, 95%, 98% or 99% amino acid identity over a stretch of at least 10, 20, 30, 50, 75 or 100 amino acids of such protein or peptide. Preferably, a variant of a protein comprises a functional variant of the protein, which means, in the context of the invention, that the variant exerts essentially the same, or at least 40%, 50%, 60%, 70%, 80%, 90% of the immunogenicity as the protein it is derived from.

### SHORT DESCRIPTION OF THE INVENTION

[0055] The present invention is based on the inventor's surprising finding that at least one peptide or protein derived from Rotavirus, provided by the coding RNA of the first aspect, can efficiently be expressed in human cells and induces strong and efficient immune responses (see e.g. Example 2 and 3). Through different optimizations in Rotavirus VP8* antigen design by including e.g. heterologous elements the immune responses and the expression could be further improved (e.g. Example 2, Example 9). Even more unexpected, the inventors showed that the coding RNA of the invention induces cross-reactive responses against other P-serotypes (Example 3, Example 9). Through different optimizations in mRNA design encoding the Rotavirus antigenic protein VP8* (e.g. through cap1, a poly(A)-sequence located exactly at the 3′ terminus and/or inventive UTR-combination) expression and immune responses could be further remarkably improved, particularly regarding neutralizing titers (VNTs) and T-cell responses in comparison to adjuvanted recombinant Rotavirus protein (Example 4, 5, 6), indicating that the coding RNA or the compostions/vaccine of the invention is therefore suitable for use as a vaccine, e.g. as a vaccine in human subjects.

[0056] In a first aspect, the present invention provides a coding RNA, preferably a coding RNA for a Rotavirus vaccine, comprising at least one 5′ untranslated region (UTR) and/or at least one 3′ untranslated region (UTR), and at least one coding sequence operably linked to said 3′-UTR and/or 5′-UTR encoding at least one antigenic peptide or protein of a Rotavirus, preferably a Rotavirus VP8*, or an immunogenic fragment or immunogenic variant thereof.

[0057] In a second aspect, the present invention provides a composition, preferably an immunogenic composition comprising at least one coding RNA of the first aspect. Suitably, the composition may comprise at least one coding RNA complexed with, encapsulated in, or associated with one or more lipids, thereby forming lipid nanoparticles.

[0058] In a third aspect, the present invention provides a Rotavirus vaccine wherein the vaccine comprises at least one coding RNA of the first aspect or the composition of the second aspect.

[0059] In a fourth aspect, the present invention provides a kit or kit of parts comprising at least one coding RNA of the first aspect, and/or at least one composition of the second aspect, and/or at least one vaccine of the third aspect.

[0060] The invention further concerns a method of treating or preventing Rotavirus infection in a subject, and first and second medical uses of the coding RNA, compositions, and vaccines. Also provided are methods of manufacturing the coding RNA, the composition, or the vaccine.

### DETAILED DESCRIPTION OF THE INVENTION

[0061] The present application is filed together with a sequence listing in electronic format, which is part of the description of the present application (WIPO standard ST.25). The information contained in the sequence listing is incorporated herein by reference in its entirety. Where reference is made herein to a “SEQ ID NO”, the corresponding nucleic acid sequence or amino acid (aa) sequence in the sequence listing having the respective identifier is referred to. For many sequences, the sequence listing also provides additional detailed information, e.g. regarding certain structural features, sequence optimizations, GenBank or NCBI identifiers, or additional detailed information regarding its coding capacity. In particular, such information is provided under numeric identifier <223> in the WIPO standard ST.25 sequence listing. Accordingly, information provided under said numeric identifier <223> is explicitly included herein in its entirety and has to be understood as integral part of the description of the underlying invention.

[0062] Coding RNA for a Rotavirus Vaccine:

[0063] In a first aspect, the invention relates to a coding RNA, preferably a coding RNA suitable for a Rotavirus vaccine, comprising at least one coding sequence encoding a Rotavirus antigenic peptide or protein.

[0064] In embodiments of the invention the coding RNA for a Rotavirus vaccine comprises
[0065] a) at least one heterologous 5′ untranslated region (5′-UTR) and/or at least one heterologous 3′ untranslated region (3′-UTR); and
[0066] b) at least one coding sequence operably linked to said 3′-UTR and/or 5′-UTR encoding at least one antigenic peptide or protein of a Rotavirus, or an immunogenic fragment or immunogenic variant thereof.

[0067] The coding RNA of the first aspect may form the basis for an RNA based vaccine. The vaccine based on the inventive coding RNA allows parenteral delivery that is not affected by possible efficacy reductions which may occur via the oral route. Generally, protein-based vaccines, or live attenuated vaccines known in the art are suboptimal in developing countries due to their high production costs. In contrast, the coding RNA or the RNA-based vaccines according to the present invention allow very cost-effective production. Therefore, in comparison with known vaccines the vaccine based on the inventive coding RNA can be produced significantly cheaper, which is very advantageous particularly for use in developing countries. One further advantage of a vaccine based on the inventive coding RNA may be its temperature-stable nature in comparison with the life oral rotavirus vaccines available or with other protein or peptide-based vaccine compositions.

[0068] The term “coding RNA” as used herein will be recognized and understood by the person of ordinary skill in the art, and are e.g. intended to refer to an RNA comprising a coding sequence (“cds”) comprising several nucleotide triplets, wherein said cds may be translated into a peptide or protein (e.g. upon administration to a cell or an organism).

[0069] The term “coding RNA for a vaccine” as used herein has to be understood as a coding RNA having certain advantageous features that makes the RNA suitable for in vivo administration to a cell or subject, e.g. a human. Moreover, a “coding RNA for a vaccine” is preferably expressed, that is translated into protein, when administered to a subject, e.g. a human. In addition, the “coding RNA for a vaccine” preferably induces a specific immune response against the encoded protein after administration to a subject, e.g. a human.

[0070] Preferably, intramuscular or intradermal administration of said “coding RNA for a vaccine” results in expression of the encoded Rotavirus antigen in a subject.

[0071] The term “immunogenic fragment” or “immunogenic variant” has to be understood as a fragment/variant of the corresponding antigen (e.g. Rotavirus VP8*) that is capable of raising an immune response in a subject.

[0072] In general, the RNA of the invention may be composed of a protein-coding region (also referred to as coding sequence “cds”, or “ORF”), and 5′ and/or 3′ untranslated regions (UTRs). The 3′-UTR is variable in sequence and size; it typically spans between the stop codon and the poly(A) tail. Importantly, the 3′-UTR sequence harbors several regulatory motifs that determine RNA turnover, stability and localization, and thus governs many aspects of post-transcriptional regulation. In medical application of RNA (e.g. immunotherapy applications, vaccination) the regulation of RNA translation into protein is of paramount importance to therapeutic safety and efficacy. The present inventors surprisingly discovered that certain RNA constructs enable the rapid and transient expression of high amounts of Rotavirus antigenic peptides or proteins. Further, said RNA molecules induce, when administered to a subject, a balanced immune response, comprising both cellular and humoral immunity. Accordingly, the coding RNA provided herein is particularly useful and suitable for various applications in vivo, including the vaccination against Rotavirus, and may, accordingly, be a suitable component of a vaccine for treating and/or preventing Rotavirus infections.

[0073] Rotavirus possesses a double stranded, segmented RNA genome that encodes for six structural and six non-structural proteins and forms non-enveloped particles with three-layered icosahedral capsids. The six structural proteins (VPs—viral proteins) form the virus particle (virion) and are called VP1, VP2, VP3, VP4, VP6 and VP7. The six non-structural proteins (NSPs) are called NSP1, NSP2, NSP3, NSP4, NSP5 and NSP6 and are important for viral mRNA translation, for genome replication, genome encapsidation and capsid assembly. In addition, non-structural proteins are involved in antagonizing the antiviral host response and in subverting important cellular processes to enable successful virus replication.

[0074] The term “peptide or protein of a Rotavirus” relates to any Rotavirus proteins, but also to fragments, variants or derivatives thereof, preferably to immunogenic fragments or immunogenic variants thereof.

[0075] In embodiments, the at least one antigenic peptide or protein of a Rotavirus may be selected from a structural protein selected from VP1, VP2, VP3, VP4, VP6 and VP7. Suitable amino acid sequences may be selected from SEQ ID NOs: 1-26 of published PCT application WO2017/081110A1, or fragments and variants thereof, SEQ ID NOs: 1-26 and the disclosure provided in WO2017/081110A1 relating thereto herewith incorporated by reference.

[0076] In embodiments, the at least one antigenic peptide or protein of a Rotavirus may be selected from a non-structural protein selected from NSP1, NSP2, NSP3, NSP4, NSP5 and NSP6. Suitable amino acid sequences may be selected from SEQ ID NOs: 27-39 of published PCT application WO2017/081110A1, or fragments and variants thereof, SEQ ID NOs: 27-39 and the disclosure provided in WO2017/081110A1 relating thereto herewith incorporated by reference.

[0077] In other embodiments, the at least one antigenic peptide or protein of a Rotavirus may be selected from VP4 or VP7 or, preferably, a cleavage product of VP4. These proteins are particularly preferred because they are components of the outermost protein layer of Rotavirus which may be especially relevant for an immune response. In preferred embodiments the protein is identical or is derived from a cleavage product of VP4, preferably VP5* (e.g. according to SEQ ID NO: 40 of published PCT application WO2017/081110A1) or VP8* (e.g. according to SEQ ID NO: 41, SEQ ID NO: 45, SEQ ID NO: 47 or SEQ ID NO: 49 of published PCT application WO2017/081110A1), wherein VP8* is particularly preferred. Although VP5* and VP8* are (in vivo) cleavage products of the protein VP4 they are nevertheless referred to as proteins. In that context, SEQ ID NOs: 40 to 49 of WO2017/081110A1, or fragments and variants thereof, and the disclosure provided in WO2017/081110A1 relating thereto are herewith incorporated by reference.

[0078] In various other embodiments, the at least one antigenic peptide or protein of a Rotavirus may be selected from any of the amino acid sequences according to SEQ ID NOs: 1-827 of WO2017/081110A1 or fragments and variants thereof. Accordingly, SEQ ID NOs: 1-827 of WO2017/081110A1, or fragments and variants thereof, and the disclosure provided in WO2017/081110A1 relating thereto herewith incorporated by reference.

[0079] In a preferred embodiment, the coding RNA for a Rotavirus vaccine comprises
[0080] a) at least one heterologous 5′ untranslated region (5′-UTR) and/or at least one heterologous 3′ untranslated region (3′-UTR); and
[0081] b) at least one coding sequence operably linked to said 3′-UTR and/or 5′-UTR encoding at least one antigenic protein of a Rotavirus, wherein said antigenic protein is or is derived from VP8* or an immunogenic fragment or immunogenic variant thereof.

[0082] As described above, VP8* is a protein (or a protein cleavage product) that is generated upon a naturally occurring proteolytic cleavage of the viral cell surface protein VP4 to VP5* and VP8*.

[0083] As used herein, the term Rotavirus relates to any Rotavirus strains, (serological) species (e.g. Rotavirus A), serotype (e.g. Serotype [P8] of Rotavirus A) etc. capable of causing a Rotavirus infection in a subject.

[0084] Accordingly, the at least one antigenic peptide or protein of a Rotavirus, preferably VP8*, may be derived from any Rotavirus as defined herein.

[0085] Rotaviruses belong to the family of Reoviridae and have been subdivided into eight species, namely five serological species (Rotavirus A to E) and two additional tentative species (Rotavirus F and G). These species are commonly referred to as “RV groups”. Three species thereof (A, B and C) can infect humans and animals. The other species D, E, F and G have been identified in animals, mostly in birds. Rotavirus A is responsible for more than 90% of all human infections and is most important for human infection and disease. It is transmitted by the faecal-oral route and targets enterocytes in the villi of the small intestine, leading to cell damage and gastroenteritis.

[0086] Within the species Rotavirus A, there are different strains (serotypes or genotypes), which are classified by a dual system based on the structural proteins VP7 and VP4. VP7 and VP4 are components of the outermost protein layer (outer capsid), and both carry neutralizing epitopes. VP7 is a glycoprotein (G) that forms the outer layer or surface of the virion. VP7 determines the G-type of the strain. 27 different G-serotypes (G1-G27) have been described. VP4 is a surface protein that protrudes as a spike. VP4 is essential for virus-cell interaction and determines host range and virulence of the virus. VP4 is protease sensitive (P) and determines the P-type of the virus. There are 35 P-serotypes (P[1]-P[35]). This dual classification system may be applied to any Rotavirus (e.g. Rotavirus A to E).

[0087] Preferably in the context of the invention, the Rotavirus from which the Rotavirus antigenic peptide or protein is derived from is a Rotavirus species selected form the species A, B, C, D, E, F, G or H, wherein it is particularly preferred that the rotavirus is selected from species A, B or C. Species A, B and C are known to infect humans and various animals. Rotavirus is a Rotavirus A (RVA) is of particular relevance for human infections.

[0088] In preferred embodiments, the Rotavirus is selected from species A, B or C. In particularly preferred embodiments, the Rotavirus is Rotavirus A (RVA). Accordingly, the at least one antigenic peptide or protein of a Rotavirus, preferably VP8*, may be derived form a Rotavirus A (RVA).

[0089] The Rotavirus, preferably the Rotavirus A, may be selected from any one of the following G-serotypes and P-serotypes: G1, G2, G3, G4, G5, G6, G7, G8, G9, G10, G11, G12, G13, G14, G15, G16, G17, G18, G19, G20, G21, G22, G23, G24, G25, G26, G27, P[1], P[2], P[3], P[4], P[5], P[6], P[7], P[8], P[9], P[10], P[11], P[12], P[13], P[14], P[15], P[16], P[17], P[18], P[19], P[20], P[21], P[22], P[23], P[24], P[25], P[26], P[27], P[28], P[29], P[30], P[31], P[32], P[33], P[34], or P[35].

[0090] In humans, around 90% of infections are caused by G1, G2, G3 or G4 and also G9 and G12. With respect to the P-types P[4], P[6] and P[8] are the most prevalent. Importantly, infection with one serotype does not induce cross-protection against infection by a different serotype.

[0091] Accordingly, in preferred embodiments of the first aspect, the Rotavirus is selected from the G-serotypes or P-serotypes G1, G2, G3, G4, G9, G12, P[4], P[6] or P[8]. Accordingly, the at least one antigenic peptide or protein of a Rotavirus, preferably VP8*, may be derived form a Rotavirus A (RVA) selected from the G-serotypes or P-serotypes G1, G2, G3, G4, G9, G12, P[4], P[6] or P[8].

[0092] In particularly preferred embodiments of the first aspect, the Rotavirus is selected from P-serotypes P[4], P[6] or P[8].

[0093] Accordingly, the at least one antigenic peptide or protein of a Rotavirus, preferably VP8*, may suitably be derived form a Rotavirus A (RVA), preferably selected from the G-serotypes or P-serotypes G1, G2, G3, G4, G9, G12, P[4], P[6] or P[8], more preferably from P-serotypes P[4], P[6] or P[8].

[0094] Accordingly, the at least one antigenic peptide or protein of a Rotavirus may be derived from Rotavirus strains with the following NCBI Taxonomy ID (NCBI: txid or taxID): Rotavirus: 10912; Rotavirus A: 28875, 10941, 10950, 10970, 35336, 42567, 72132, 73034, 73036, 75918, 79064, 79065, 141265, 215680, 263595, 290547, 370529, 380390, 401074, 408598, 408599, 416557, 416558, 478084, 573015, 573016, 573017, 574984, 574985, 574986, 641314, 641316, 641323, 641324, 641328, 641330, 641331, 641332, 641333, 641336, 641338, 641339, 641342, 641343, 641348, 641349, 641351, 641354, 641356, 641358, 641359, 641360, 641361, 641363, 641364, 748549, 748550, 749226, 757016, 757017, 757018, 757019, 757020, 757021, 757022, 757025, 758889, 758890, 758891, 758894, 758896, 758899, 758900, 758901, 758903, 758905, 758906, 758907, 758910, 1004793, 1004798, 1004799, 1004800, 1004804, 1004811, 1004812, 1004815, 1004816, 1004822, 1004823, 1004825, 1004826, 1004827, 1004829, 1004832, 1004833, 1004834, 1004835, 1004838, 1004841, 1004842, 1004845, 1004847, 1004850, 1004854, 1004857, 1004858, 1004860, 1004861, 1004862, 1004863, 1004865, 1004866, 1004867, 1004869, 1004870, 1004871, 1004873, 1004877, 1004878, 1004879, 1004886, 1004888, 1004941, 1004943, 1004946, 1046565, 1133023, 1133024, 1133025, 1133026, 1133027, 1146934, 1146935, 1146936, 1148771, 1193386, 1193388, 1193396, 1193398, 1193399, 1307162, 1307163, 1307165, 1349389, 1454883, 1454885, 1454886, 1454887, 1454888, 1454889, 1454890, 1454891, 1454892, 1882333, 1906931, 1954144, 1954145, 1973200, 1973201, 1973204, 1973205, 1973207, 2040590, 2051936; Rotavirus B: 28876; Rotavirus C: 36427; Rotavirus D: 335100; Rotavirus F: 183405; Rotavirus G: 183407; Rotavirus H: 1348384; Rotavirus I: 1637496; unclassified Rotavirus: 101358. Preferably, the at least one antigenic peptide or protein of a Rotavirus may be derived from a Rotavirus A strain and/or from a Rotavirus that can infect humans.

[0095] Preferably, the at least one antigenic peptide or protein of a Rotavirus may be derived from the following Rotavirus A strains, preferably from Rotaviruses that can infect humans, selected from RVA/Human-wt/BEL/BE1058/2008/G2P[4], Hu/BEL/F01322/2009/G3P[6], RVA/Human-wt/BEL/BE1128/2009/G1P[8], Wa variant VirWa, SEROTYPE 2/STRAIN DS1, RVA/Human-tc/USA/DS-1/1976/G2P1B[4], DS-1, 1076, Wa, L26, RVA/Human-wt/BEL/BE1141/2009/G1P[8], RV3, ST3, RVA/Human-tc/GBR/ST3/1975/G4P2A[6], Wa variant TC-ParWa, Wa variant Wag7/8re, Wa variant Wag5re, Human-tc/USA/Wa/1974/G1P[8], RVA/Vaccine/USA/Rotarix-A41CB052A/1988/G1P1A[8], RVA/Vaccine/USA/RotaTeq-W179-4/1992/G6P1A[8], RVA/Human-wt/BEL/BE1175/2009/G1P[8], RVA/Human-tc/NGA/HMG035/1999/G8P[1], RVA/Vaccine/USA/RotaTeq-W179-9/1992/G1P7[5], RVA/Vaccine/USA/RotaTeq-SC2-9/1992/G2P7[5], RVA/Vaccine/USA/RotaTeq-W178-8/1992/G3P7[5], RVA/Vaccine/USA/RotaTeq-BrB-9/1996/G4P7[5], RVA/Human-TC/USA/Rotarix/2009/G1P[8], RVA/Vaccine/USA/RotaTeq-W179-4/1992/G6P1A[8], human-wt/ITA/ME848/12/2012/G12P9, RVA/Human-tc/IDN/57M/1980/G4P[10], RVA/Human-wt/BEL/B4106/2000/G3P[14], RVA/Human_wt/VNM/30378/2009/G26P[19], RVA/Human-wt/BGD/Dhaka6/2001/G11P[25], Ecu534.

[0096] In preferred embodiments, the Rotavirus is selected from Human rotavirus A BE1058 (RVA/Human-wt/BEL/BE1058/2008/G2P[4], G2P[4], JN849123.1, GI:371455744, AEX30665.1, acronym: RVA/BE1058/P[4]), Human rotavirus A F01322 (Hu/BEL/F01322/2009/G3P[6], G3P[6], JF460826.1, GI:37531451, AFA51886.1, acronym: RVA/F01322/P[6]), Human rotavirus A BE1128 (RVA/Human-wt/BEL/BE1128/2009/G1P[8], G1P[8], JN849135.1, GI:371455756, AEX30671.1, acronym: RVA/BE1128/P[8]), Human rotavirus A WA-VirWa (Wa variant VirWa, G1P[8], ACR22783.1, GI: 237846292, FJ423116.1, acronym: RVA/Wa-VirWa/P[8]), Human rotavirus A DS-1 (SEROTYPE 2/STRAIN DS1, G2P[4], CAD62680.1, GI: 28268530, AJ540227.1; RVA/Human-tc/USA/DS-1/1976/G2P1B[4], G2P[4], ABV53252.1, GI: 157389072, EF672577.1, acronym: RVA/DS-1/P[4]), Human rotavirus A 1076 (G2P[6], AAA47337.1, GI: 333858, M88480.1, acronym: RVA/1076/P[6]), Human rotavirus A WA (G1P[8], AAA47290.1, GI: 333780, M96825.1; AAA66953.1, GI: 507317, L34161.1, acronym: RVA/Wa/P[8]).

[0097] In particularly preferred embodiments, the Rotavirus is selected from Human rotavirus A BE1058 (RVA/Human-wt/BEL/BE1058/2008/G2P[4], G2P[4], JN849123.1, GI: 371455744, AEX30665.1, acronym: RVA/BE1058/P[4]), Human rotavirus A F01322 (Hu/BEL/F01322/2009/G3P[6], G3P[6], JF460826.1. GI: 37531451, AFA51886.1, acronym: RVA/F01322/P[6]), Human rotavirus A BE1128 (RVA/Human-wt/BEL/BE1128/2009/G1P[8], G1P[8], JN849135.1. GI: 371455756, AEX30671, acronym: RVA/BE1128/P[8]), or Human rotavirus A WA-VirWa (Wa variant VirWa, G1P[8], ACR22783.1, GI: 237846292, FJ423116, acronym: RVA/Wa-VirWa/P[8]).

[0098] In embodiments, the coding RNA of the invention encodes at least one antigenic protein that is or is derived from VP8*, wherein the VP8* is a full length VP8* protein having an amino acid sequence comprising or consisting of amino acid 1 to amino acid 240 (some Rotavirus A strains exhibit a VP8* with a full length of 241 or 243 amino acids). In other embodiments, the coding RNA of the invention encodes at least one antigenic protein that is or is derived from VP8*, wherein the VP8* is a fragment of a VP8* protein.

[0099] It has to be noted that where reference is made to amino acid (aa) residues and their position in VP8*, any numbering used herein—unless stated otherwise—relates to the position of the respective amino acid residue in a corresponding VP8* of BE1128 according to SEQ ID NO: 24. Respective amino acid positions are, throughout the disclosure, exemplarily indicated for VP8* of BE1128 (RVA/BE1128/P[8], RVA/Human-wt/BEL/BE1128/2009/G1P[8], G1P[8], JN849135.1, GI:371455756, AEX30671.1, abbreviated herein as “BE1128”). The person skilled in the art will of course be able to adapt the teaching relating to VP8* of BE1128 to each and every VP8* as provided herein, in particular to each and every full length VP8* and to each and every VP8* fragment as provided below and in the sequence listing (e.g., SEQ ID NOs: 1-585, 586-1737, 1862-1882, 1885-1898, 1899-1906, or 1907-1930).

[0100] Each of the amino acid sequences for VP8* full length being identical or at least 70%, 80%, 85%, 86%, 87%, 88%, 89%, 90%, 91%, 92%, 93%, 94%, 95%, 96%, 97%, 98%, or 99% identical to any one of SEQ ID NOs: 19-27, or an immunogenic fragment or immunogenic variant of any of these sequences, may be the “at least one antigenic protein” of the invention. Particularly preferred are amino acid sequences for VP8* full length being identical or at least 70%, 80%, 85%, 86%, 87%, 88%, 89%, 90%, 91%, 92%, 93%, 94%, 95%, 96%, 97%, 98%, or 99% identical to any one of SEQ ID NOs: 19, 22, 24 or 25. Additional information regarding each of these suitable amino acid sequences encoding proteins derived from Rotavirus may also be derived from the sequence listing, in particular from the details provided therein under identifier <223> as explained in the following.

[0101] In embodiments, the coding RNA of the invention encodes at least one antigenic protein that is or is derived from VP8*, wherein the VP8* is a fragment of a VP8* protein.

[0102] A “fragment of a VP8* protein” has to be understood as an N-terminal and/or a C-terminal truncated version of a (full length) VP8* protein that typically comprises 240 amino acids (amino acid 1 to amino acid 240) (according to reference VP8* of BE1128, SEQ ID NO: 24). In the context of the invention, the N- and/or C-terminal truncation has to be selected by the skilled person in a way that no important T-cell and/or B-cell epitopes are removed. Suitably, a “fragment of a VP8* protein” is large enough to elicit an adaptive immune response in a subject (wherein, in the context of the invention, the fragment of a VP8* protein is provided by the coding RNA). Therefore, a “fragment of a VP8* protein” comprises or consists of an amino acid sequence that has a length of at least about 95%, 90%, 85%, 80%, 75%, 70%, 65%, 60%, 55%, or 50% of the full length VP8* protein amino acid sequence (comprising typically 240 amino acids). A “fragment of a VP8* protein” may comprise an amino acid sequence that has a length of at least about 230, 225, 220, 215, 210, 205, 200, 195, 190, 185, 180, 175, 170, 165, 160, 155, 150, 145, 140, 135, 130, 125, 120 amino acids of a corresponding full length VP8* protein (comprising e.g. 240 amino acids) (according to reference VP8* of BE1128, SEQ ID NO: 24).

[0103] In preferred embodiments, the at least one antigenic protein derived from Rotavirus VP8* comprise an amino acid sequence stretch derived from VP8*, wherein said stretch corresponds to at least 50% full length VP8*, 55% full length VP8*, 60% full length VP8*, 65% full length VP8*, 70% full length VP8*, 75% full length VP8*, 80% full length VP8*, 85% full length VP8*, 90% full length VP8*, 95% full length VP8*, 96% full length VP8*, 97% full length VP8*, 98% full length VP8*, 99% full length VP8*, or 97% full length VP8*, wherein the amino acid stretch is preferably derived from VP8*of RVA/BE1058/P[4], RVA/F01322/P[6], RVA/BE1128/P[8] or RVA/Wa-VirWa/P[8] according to reference VP8* of BE1128, SEQ ID NO: 24), wherein full length VP8* (that is 100% full length) has a length of 240 amino acids.

[0104] “Corresponds to” in that context has to be understood as an amino acid sequence being identical, or at least 80%, 85%, 90%, 95%, 96%, 97%, 98%, 99% identical to the an amino acid sequence of VP8*, in particular to the an amino acid sequence of VP8* that is or is derived from strains RVA/BE1058/P[4], RVA/F01322/P[6], RVA/BE1128/P[8] or RVA/Wa-VirWa/P[8] according to SEQ ID NOs: 19, 22, 24 or 25.

[0105] In embodiments, the fragment of a VP8* protein is N-terminally truncated, lacking the N-terminal amino acids 1 to up to 100 of the full length VP8*. Such a fragment of a VP8* protein may have the following amino acids (aa) of a corresponding full length VP8*: 2-240, 3-240, 4-240, 5-240, 6-240, 7-240, 8-240, 9-240, 10-240, 11-240, 12-240, 13-240, 14-240, 15-240, 16-240, 17-240, 18-240, 19-240, 20-240, 21-240, 22-240, 23-240, 24-240, 25-240, 26-240, 27-240, 28-240, 29-240, 30-240, 31-240, 32-240, 33-240, 34-240, 35-240, 36-240, 37-240, 38-240, 39-240, 40-240, 41-240, 42-240, 43-240, 44-240, 45-240, 46-240, 47-240, 48-240, 49-240, 50-240, 51-240, 52-240, 53-240, 54-240, 55-240, 56-240, 57-240, 58-240, 59-240, 60-240, 61-240, 62-240, 63-240, 64-240, 65-240, 66-240, 67-240, 68-240, 69-240, 70-240, 71-240, 72-240, 73-240, 75-240, 75-240, 76-240, 77-240, 78-240, 79-240, 80-240, 81-240, 82-240, 83-240, 84-240, 85-240, 86-240, 87-240, 88-240, 89-240, 90-240, 91-240, 92-240, 93-240, 94-240, 95-240, 96-240, 97-240, 98-240, 99-240, 100-240 (according to reference VP8* of BE1128, SEQ ID NO: 24).

[0106] In embodiments, the fragment of a VP8* protein is C-terminally truncated, lacking the C-terminal amino acids 1 to up to 100 of the full length VP8*. Such a fragment of a VP8* protein may have the following amino acids (aa) of a corresponding full length VP8*: 1-239, 1-238, 1-237, 1-236, 1-235, 1-234, 1-233, 1-232, 1-231, 1-230, 1-229, 1-228, 1-227, 1-226, 1-225, 1-224, 1-223, 1-222, 1-221, 1-220, 1-219, 1-218, 1-217, 1-216, 1-215, 1-214, 1-213, 1-212, 1-211, 1-210, 1-209, 1-208, 1-207, 1-206, 1-205, 1-204, 1-203, 1-202, 1-201, 1-200, 1-199, 1-198, 1-197, 1-196, 1-195, 1-194, 1-193, 1-192, 1-191, 1-190, 1-189, 1-188, 1-187, 1-186, 1-185, 1-184, 1-183, 1-182, 1-181, 1-180, 1-179, 1-178, 1-177, 1-176, 1-175, 1-174, 1-173, 1-172, 1-171, 1-170, 1-169, 1-168, 1-167, 1-166, 1-165, 1-164, 1-163, 1-162, 1-161, 1-160, 1-159, 1-158, 1-157, 1-156, 1-155, 1-154, 1-153, 1-152, 1-151, 1-150, 1-149, 1-148, 1-147, 1-146, 1-145, 1-144, 1-143, 1-142, 1-141, 1-140 (according to reference VP8* of BE1128, SEQ ID NO: 24).

[0107] In embodiments, the fragment of a VP8* protein is N-terminally truncated as defined above and additionally C-terminally truncated as defined above. Any combination of N-terminal and C-terminal truncation of VP8* is envisaged herein and may be used as suitable “fragment of a VP8* protein” in the context of the invention (according to reference VP8* of BE1128, SEQ ID NO: 24).

[0108] In preferred embodiments, the fragment of a VP8* protein lacks the N-terminal alpha-helix domain (usually aa 1-26). In preferred embodiments, the fragment of a VP8* protein lacks the N-terminal part (including alpha-helix domain) and comprises a lectin domain (starting with about aa 41). Suitably, the VP8* fragment comprises the lectin domain of VP8* protein (aa65 to aa223) (amino acids positions according to reference VP8* of BE1128, SEQ ID NO: 24, further detailed information regarding VP8* domains and amino acid positions can be found in “Xue, Miaoge, et al. “Characterization and protective efficacy in an animal model of a novel truncated rotavirus VP8 subunit parenteral vaccine candidate.” Vaccine 33.22 (2015): 2606-2613.

[0109] In particularly preferred embodiments, the fragment of VP8* comprises the lectin domain of VP8* and lacks the N-terminal alpha helix-domain.

[0110] In specific embodiments, the fragment of a VP8* protein has an amino acid sequence comprising or consisting of amino acid 1 to amino acid 223, amino acid 41 to amino acid 223, amino acid 65 to amino acid 223, amino acid 41 to amino acid 230, or amino acid 65 to amino acid 230 (of a corresponding full length VP8* according to reference VP8* of BE1128, SEQ ID NO: 24).

[0111] In preferred embodiments, the fragment of a VP8* protein has an amino acid sequence comprising or consisting of amino acid 41 to amino acid 223, or amino acid 65 to amino acid 223 (of a corresponding full length VP8*). Accordingly, in a preferred embodiment, the at least one antigenic peptide or protein of a Rotavirus, preferably VP8*, may suitably be derived form a Rotavirus A (RVA), preferably selected from the G-serotypes or P-serotypes G1, G2, G3, G4, G9, G12, P[4], P[6] or P[8], more preferably from P-serotypes P[4], P[6] or P[8], wherein VP8* is a fragment of a VP8* protein, wherein the fragment of a VP8* protein has an amino acid sequence comprising or consisting of amino acid 41 to amino acid 223, or amino acid 65 to amino acid 223 (of a corresponding full length VP8* of BE1128, SEQ ID NO: 24).

[0112] Each of the amino acid sequences for VP8* fragments being identical or at least 70%, 80%, 85%, 86%, 87%, 88%, 89%, 90%, 91%, 92%, 93%, 94%, 95%, 96%, 97%, 98%, or 99% identical to any one of SEQ ID NOs: 28-45, or an immunogenic fragment or immunogenic variant of any of these sequences may be the “at least one antigenic protein” of the invention. Additional information regarding each of these suitable amino acid sequences encoding proteins from Rotavirus may also be derived from the sequence listing, in particular from the details provided therein under identifier <223> as explained in the following.

[0113] Further VP8* fragments may be derived from Table 1 of published PCT application WO2017/081110A1. Accordingly, any of the provided amino acid sequences being identical or at least 70%, 80%, 85%, 86%, 87%, 88%, 89%, 90%, 91%, 92%, 93%, 94%, 95%, 96%, 97%, 98%, or 99% identical to any one of SEQ ID NOs of Table 1 of published PCT application WO2017/081110A1, or an immunogenic fragment or immunogenic variant of any of these sequences, may suitably be used in the context of the invention.

[0114] In various embodiments, the amino acid sequences of the at least one antigenic protein derived from Rotavirus, in particular Rotavirus VP8*, is mutated/substituted to delete at least one predicted or potential glycosylation site.

[0115] It may suitable in the context of the invention that glycosylation sites in the encoded amino acid sequence are mutated/substituted which means that encoded amino acids which may be glycosylated, e.g. after translation of the coding RNA upon in vivo administration, are exchanged to a different amino acid. Accordingly, on nucleic acid level, codons encoding asparagine which are predicted to be glycosylated (N glycosylation sites) are substituted with codons encoding glutamine.

[0116] In embodiments, the coding region encoding at least one rotavirus protein, or a fragment, variant or derivative thereof, is mutated in a way to delete at least one predicted or potential glycosylation site. Glycosylation is an important post-translational or co-translational modification of proteins. The majority of proteins synthesized in the rough endoplasmatic reticulum (ER) undergo glycosylation. There are mainly two types of glycosylation: a) In N-glycosylation, the addition of sugar chains takes place at the amide nitrogen on the side-chain of the asparagine or arginine. b) In O-glycosylation, the addition of sugar chains takes place on the hydroxyl oxygen on the side-chain of hydroxylysine, hydroxyproline, serine, tyrosine or threonine. Moreover, phospho-glycans linked through the phosphate of a phospho-serine and C-linked glycans, a rare form of glycosylation where a sugar is added to a carbon on a tryptophan side-chain, are known. Since the encoded Rotavirus protein, e.g. VP8*, is not glycosylated in the viral life cycle, entry in the ER might lead to modifications by glycosylation that could lead to epitope shielding and therefore prevent an efficient immune response. Therefore, it is particularly advantageous to delete the potential glycosylation sites of the encoded Rotavirus protein, in particular VP8*. By mutation/substitution of the relevant amino acids, the glycosylation may be prevented. In this context at least one codon coding for an asparagine, arginine, serine, threonine, tyrosine, lysine, proline or tryptophan is modified in such a way that a different amino acid is encoded thereby deleting at least one predicted or potential glycosylation site. The predicted glycosylation sites may be predicted by using artificial neural networks that examine the sequence for common glycosylation sites, e.g. N-glycosylation sites may be predicted by using the NetNGlyc 1.0 Server.

[0117] In preferred embodiments, the at least one antigenic protein from Rotavirus, preferably of VP8* of a Rotavirus, is mutated to delete at least one predicted or potential glycosylation site, e.g. asparagine (N) is substituted by a glutamine (Q). Accordingly, on nucleic acid level, the nucleic acid sequence is modified to encode for Q instead of N at predicted N-glycosylation sites, for example at predicted N-glycosylation sites of the encoded VP8* protein, or a fragment, variant or derivative thereof. In this context the term “mutated VP8* means that at least one (predicted) glycosylation site is mutated.

[0118] In various embodiments, the amino acid sequences of the at least one antigenic protein from Rotavirus, in particular Rotavirus VP8*, is mutated to delete all predicted or potential glycosylation sites.

[0119] Accordingly, it may be particularly preferred that all predicted glycosylation sites of the amino acid sequences of the at least one antigenic protein, in particular Rotavirus VP8* are mutated to completely prevent glycosylation of the resulting protein or peptide. This aspect of the invention may apply for e.g. all N-glycosylation sites or for all O-glycosylation sites or for all glycosylation sites irrespective of their biochemical nature.

[0120] A suitable amino acid sequence for mutated VP8* of P-serotype P[4] is provided in SEQ ID NO: 125 of published PCT application WO2017/081110A1, wherein N-glycosylation modifications are N67Q; N91Q; N132Q; N148Q; N230Q. A further suitable amino acid sequence for mutated VP8* of P-serotype P[6] is provided in SEQ ID NO: 126 of published PCT application WO2017/081110A1, wherein N-glycosylation modifications are N67Q; N91Q; N132Q; N146Q. A further suitable amino acid sequence for mutated VP8* of P-serotype P[6] is provided in SEQ ID NO: 3210 of published PCT application WO2017/081110A1, wherein N-glycosylation modifications are N67Q; N91Q; N132Q; N146Q. A further suitable amino acid sequence for mutated VP8* of P-serotype P[8] is provided in SEQ ID NOs: 127 and 128 of published PCT application WO2017/081110A1, wherein N-glycosylation modifications were done at N67Q; N91Q; N132Q. Accordingly, SEQ ID NOs: 125-128 and 3210 of published PCT application WO2017/081110A1 are herewith incorporated by reference.

[0121] In various embodiments, the coding RNA of the first aspect comprises at least one coding sequence encoding at least one antigenic protein, preferably VP8*, comprising or consisting of at least one amino acid sequences being identical or at least 70%, 80%, 85%, 86%, 87%, 88%, 89%, 90%, 91%, 92%, 93%, 94%, 95%, 96%, 97%, 98%, or 99% identical to any one of SEQ ID NOs: 10-45, or an immunogenic fragment or immunogenic variant of any of these sequences. Additional information regarding each of these suitable amino acid sequences encoding VP8* antigen constructs may also be derived from the sequence listing, in particular from the details provided therein under identifier <223> as explained in the following.

[0122] According to various preferred embodiments, the coding RNA of the invention encodes at least one antigenic peptide or protein from Rotavirus, preferably VP8* or a VP8* fragment as defined herein, and additionally at least one heterologous peptide or protein element.

[0123] Suitably, the at least one heterologous peptide or protein element may promote secretion of the encoded antigenic peptide or protein of the invention (e.g. via secretory signal sequences), promote anchoring of the encoded antigenic peptide or protein of the invention in the plasma membrane (e.g. via transmembrane elements), promote formation of antigen complexes (e.g. via multimerization domains or antigen clustering domains), promote virus-like particle formation (VLP forming sequence). In addition, the coding RNA may additionally encode peptide linker elements, self-cleaving peptides, immunologic adjuvant sequences or dendritic cell targeting sequences. Trimerization and tetramerization elements may be selected from e.g. engineered leucine zippers (engineered α-helical coiled coil peptide that adopt a parallel trimeric state), fibritin foldon domain from enterobacteria phage T4, GCN4pII, GCN4-pLI, and p53. Suitable VLP forming sequences may be selected from the list of amino acid sequences according to SEQ ID NOs: 1168-1227 of the patent application WO2017/081082, or fragments or variants of these sequences. Suitable peptide linkers may be selected from the list of amino acid sequences according to SEQ ID NOs: 1509-1565 of the patent application WO2017/081082, or fragments or variants of these sequences. Suitable self-cleaving peptides may be selected from the list of amino acid sequences according to SEQ ID NOs: 1434-1508 of the patent application WO2017/081082, or fragments or variants of these sequences. Suitable immunologic adjuvant sequences may be selected from the list of amino acid sequences according to SEQ ID NOs: 1360-1421 of the patent application WO2017/081082, or fragments or variants of these sequences. Suitable dendritic cell (DCs) targeting sequences may be selected from the list of amino acid sequences according to SEQ ID NOs: 1344-1359 of the patent application WO2017/081082, or fragments or variants of these sequences.

[0124] Suitably, the at least one coding sequence additionally encodes one or more heterologous peptide or protein elements selected from a signal peptide, a linker peptide, a helper epitope, an antigen clustering domain, or a transmembrane domain.

[0125] In preferred embodiments, the coding RNA of the invention encoding at least one antigenic protein derived from VP8* of a Rotavirus, and additionally encodes at least one heterologous secretory signal peptide.

[0126] Suitably, the secretory signal peptide is or is derived from tissue plasminogen activator (TPA or HsPLAT), human serum albumin (HSA or HsALB), or immunoglobulin IgE (IgE).

[0127] In preferred embodiments, the secretory signal peptide is or is derived from HsPLAT, HsALB, or IgE, wherein the amino acid sequences of said heterologous signal peptides is identical or at least 70%, 80%, 85%, 86%, 87%, 88%, 89%, 90%, 91%, 92%, 93%, 94%, 95%, 96%, 97%, 98%, or 99% identical to any one of amino acid sequences SEQ ID NOs: 1738-1740, or fragment or variant of any of these.

[0128] In particularly preferred embodiments, the secretory signal peptide is or is derived from IgE, wherein the amino acid sequences of said heterologous signal peptide is identical or at least 70%, 80%, 85%, 86%, 87%, 88%, 89%, 90%, 91%, 92%, 93%, 94%, 95%, 96%, 97%, 98%, or 99% identical to any one of amino acid sequence SEQ ID NO: 1738, or fragment or variant of any of these.

[0129] In embodiments where the coding RNA of the invention additionally encodes heterologous secretory signal peptides, it is particularly preferred and suitable to generate a fusion protein comprising a heterologous N-terminal secretory signal peptide and a C-terminal peptide or protein derived from VP8*, wherein said C-terminal peptide or protein derived from VP8* is preferably lacking an endogenous N-terminal secretory signal peptide.

[0130] Constructs comprising an N-terminal secretory signal peptide may ideally improve the secretion of the Rotavirus protein, preferably the VP8* protein (that is encoded by the coding RNA of the first aspect). Accordingly, improved secretion of the Rotavirus protein, preferably the VP8* protein, upon administration of the coding RNA of the first aspect, may be advantageous for the induction of humoral immune responses against the encoded Rotavirus antigenic protein.

[0131] Further suitable secretory signal peptides may be selected from the list of amino acid sequences according to SEQ ID NOs: 1-1115 and SEQ ID NO: 1728 of published PCT patent application WO2017/081082, or fragments or variants of these sequences, wherein said secretory signal peptides are N-terminally fused to a Rotavirus protein (or fragment), e.g. to VP8*, lacking the endogenous secretory signal sequence.

[0132] In some embodiments, the signal peptide is selected from: SEQ ID NOs: 423-427 of patent application WO2017/070624A1 or a fragment or variant of any of these sequences. In this context SEQ ID NOs: 423-427, of patent application WO2017/070624A1, and the disclosure related thereto, are herewith incorporated by reference.

[0133] Suitable examples of Rotavirus VP8* constructs comprising an N-terminal heterologous secretory signal sequence are SP-IgE_P2_VP8*(65-223), SP-IgE_P2_VP8*(41-223), SP-IgE_P2_VP8*(41-223)_Ferritin, SP-IgE_P2_VP8*(41-223)_TM domain-HA, HsALB_VP8*(2-230), HsALB_VP8*(11-223), HsALB_VP8*(41-223), HsALB_P2_VP8*(41-223), HsPLAT_VP8*(41-223), HsPLAT_P2_VP8*(41-223) or HsPLAT_VP8*(2-230), wherein SP-IgE_P2_VP8*(65-223) and SP-IgE_P2_VP8*(41-223) are particularly preferred. The corresponding amino acid sequences for each of the above listed constructs can be found in Table 1.

[0134] In preferred embodiments, the coding RNA of the invention encodes at least one antigenic protein of a Rotavirus as defined herein and additionally at least one heterologous helper epitope. A helper epitope may enhance the immune response of the RNA encoding the Rotavirus antigen, preferably VP8*.

[0135] In particularly preferred embodiments, the heterologous helper epitope is derived from P2 helper peptide (P2) according to SEQ ID NO: 1750. In further preferred embodiments, the helper epitope is derived from PADRE helper epitope (pan HLA DR-binding epitope, PADRE) according to SEQ ID NO: 1754.

[0136] In preferred embodiments, the helper epitope is or is derived from P2, wherein the amino acid sequences of said helper epitopes is identical or at least 70%, 80%, 85%, 86%, 87%, 88%, 89%, 90%, 91%, 92%, 93%, 94%, 95%, 96%, 97%, 98%, or 99% identical to any one of amino acid sequences SEQ ID NOs: 1750 or 1754, or fragment or variant of any of these.

[0137] In embodiments where the coding RNA of the invention additionally encodes heterologous helper epitope, it is particularly preferred and suitable to generate a fusion protein comprising a heterologous N-terminal helper epitope, optionally a linker element, and a C-terminal peptide or protein derived from VP8*. Constructs comprising an N-terminal terminal helper epitope may enhance the immune response of the RNA encoding the Rotavirus antigen, preferably VP8*. Additionally, such constructs may additionally comprise an N-terminal secretory signal sequence (as defined above). Alternatively, the helper epitope may be at the C-terminus, and the protein derived from VP8* may be at the N-terminus.

[0138] Preferably, the amino acid sequence of P2 helper epitope of tetanus toxin according to SEQ ID NO: 1750 (GenBank X04436.1 or NC_004565.1 derived from Kovacs-Nolan et al.; PMID 16978788; P2: aa 830-844) may serve as a basis for advantageous designs of the inventive coding RNA. The inclusion of P2 in antigens has been demonstrated to strongly influence the antibody responses to poorly immunogenic B cell epitopes.

[0139] Preferably, the helper epitope P2 is derived from Tetanus toxin, or a fragment, variant or derivative thereof according to SEQ ID NO: 1750 (GenBank X04436.1 or NC_004565.1 derived from Kovacs-Nolan et al.; PMID 16978788; P2: aa 830-844). The inclusion of P2 in antigens has been demonstrated to strongly influence the antibody responses to poorly immunogenic B cell epitopes. In the context of a protein-based approach it has already been shown by Wen et al. (Vaccine. 2014 Jul. 31; 32(35):4420-4427) that the N-terminal P2 helper peptide derived from tetanus toxin was able to increase immune responses against Rotavirus VP8*. Now, the inventors were able to show that the addition of a sequence encoding a helper epitope may be particularly effective in enhancing the immune response in an mRNA-based vaccine approach.

[0140] Preferably, the helper epitope is pan HLA DR-binding epitope (PADRE) or a fragment, variant or derivative thereof according to SEQ ID NO: 1754. PADRE is an immunodominant helper CD4 T-cell epitope. CD4+ T-cells play an important role in the generation of CD8+T effector and memory T-cell immune responses. The CD4+ T cell immune response, and thus the corresponding antigen-specific CD8+ T cell response, can be enhanced by encoding at least one antigenic protein of a Rotavirus as defined herein and additionally at least the heterologous helper epitope pan HLA DR-binding epitope (PADRE).

[0141] Suitable Examples of Rotavirus VP8* constructs comprising an heterologous helper epitope are P2_VP8*(65-223), P2_VP8*(41-223), P2_VP8*(65-223)_Ferritin, P2_VP8*(41-223)_Ferritin, LumSynt_P2_VP8*(65-223), LumSynt_P2_VP8*(41-223), SP-IgE_P2_VP8*(65-223), SP-IgE_P2_VP8*(41-223), SP-IgE_P2_VP8*(41-223)_Ferritin, SP-IgE_P2_VP8*(41-223)_TM domain-HA, HsALB_P2_VP8*(41-223), HsPLAT_P2_VP8*(41-223) wherein P2_VP8*(65-223), P2_VP8*(41-223), P2_VP8*(65-223)_Ferritin, P2_VP8*(41-223)_Ferritin, LumSynt_P2_VP8*(65-223), LumSynt_P2_VP8*(41-223), SP-IgE_P2_VP8*(65-223) and SP-IgE_P2_VP8*(41-223) are particularly preferred. The corresponding amino acid sequences for each of the above listed constructs can be found in Table 1.

[0142] In preferred embodiments, the coding RNA of the invention encodes at least one antigenic protein of a Rotavirus or an immunogenic fragment or immunogenic variant as defined herein, and additionally encodes at least one antigen clustering domain or multimerization domain.

[0143] Suitably, the antigen clustering domain (multimerization domain) is or is derived from ferritin, lumazine-synthase (LS) or encapsulin.

[0144] In preferred embodiments, the antigen clustering domain (multimerization domain) is or is derived from ferritin or lumazine-synthase, wherein the amino acid sequences of said antigen clustering domain is identical or at least 70%, 80%, 85%, 86%, 87%, 88%, 89%, 90%, 91%, 92%, 93%, 94%, 95%, 96%, 97%, 98%, or 99% identical to any one of amino acid sequences (SEQ ID NOs: 1764 or 1759), or a fragment or variant of any of these.

[0145] In embodiments where the coding RNA of the invention additionally encodes heterologous antigen clustering domain, it is particularly preferred and suitable to generate a fusion protein comprising a heterologous antigen clustering domain, optionally a linker element, and a peptide or protein derived from VP8*. Constructs comprising an antigen clustering domain may enhance the antigen clustering and may therefore promote immune responses e.g. by multiple binding events that occur simultaneously between the clustered antigens and the host cell receptors (see further details in López-Sagaseta, Jacinto, et al. “Self-assembling protein nanoparticles in the design of vaccines”. Computational and structural biotechnology journal 14 (2016):58-68) of the RNA encoding the Rotavirus antigen, preferably VP8*. Additionally, such constructs may additionally comprise an N-terminal secretory signal sequence (as defined above).

[0146] Lumazine synthase (LS, LumSynth) is an enzyme with particle-forming properties, present in a broad variety of organisms and involved in riboflavin biosynthesis. Jardine et al reported their attempts to enhance the immunoreactivity of recombinant gp120 against HIV infection through the inclusion of Lumazine synthase (LS) for the optimization of vaccine candidates (Jardine, Joseph, et al. “Rational HIV immunogen design to target specific germline B cell receptors”. Science 340.6133 (2013):711-716).

[0147] The addition of lumazine synthase allows VP8* secretion aimed to increase VP8* accessibility to immune cells. Furthermore, it allows the formation of 60-mer nanoparticles aimed to optimize B-cell activation (which could mimic the rotavirus, presenting likewise 60 VP8* spikes on its surface).

[0148] In particularly preferred embodiments, lumazine-synthase is used to promote the antigen clustering and may therefore promote immune responses of the RNA encoding the Rotavirus antigen, preferably VP8*.

[0149] In particularly preferred embodiments, the antigen clustering domain (multimerization domain) is or is derived from lumazine-synthase (LS), wherein the amino acid sequences of said antigen clustering domain is preferably identical or at least 70%, 80%, 85%, 86%, 87%, 88%, 89%, 90%, 91%, 92%, 93%, 94%, 95%, 96%, 97%, 98%, or 99% identical to any one of amino acid sequences (SEQ ID NO: 1759), a fragment or variant of any of these.

[0150] Ferritin is a protein whose main function is intracellular iron storage. Almost all living organisms produce ferritin which is made of 24 subunits, each composed of a four-alpha-helix bundle, that self-assemble in a quaternary structure with octahedral symmetry. Its properties to self-assemble into nanoparticles are well-suited to carry and expose antigens.

[0151] In particularly preferred embodiments, ferritin is used to promote the antigen clustering and may therefore promote immune responses of the RNA encoding the Rotavirus antigen, preferably VP8*.

[0152] In particularly preferred embodiments, the antigen clustering domain (multimerization domain) is or is derived from ferritin wherein the amino acid sequences of said antigen clustering domain is preferably identical or at least 70%, 80%, 85%, 86%, 87%, 88%, 89%, 90%, 91%, 92%, 93%, 94%, 95%, 96%, 97%, 98%, or 99% identical to any one of amino acid sequences (SEQ ID NO: 1764), a fragment or variant of any of these.

[0153] Encapsulin, a novel protein cage nanoparticle isolated from thermophile Thermotoga maritima, may also be used as a platform to present antigens on the surface of self-assembling nanoparticles. Encapsulin is assembled from 60 copies of identical 31 kDa monomers.

[0154] Suitable examples of Rotavirus VP8* constructs comprising a heterologous antigen clustering domain are P2_VP8*(65-223)_Ferritin, P2_VP8*(41-223)_Ferritin, LumSynt_P2_VP8*(65-223), LumSynt_P2_VP8*(41-223), or SP-IgE_P2_VP8*(41-223)_Ferritin, wherein P2_VP8*(65-223) Ferritin, and LumSynt_P2_VP8*(41-223) are particularly preferred. The corresponding amino acid sequences for each of the above listed constructs can be found in Table 1.

[0155] Further suitable multimerization domains/antigen clustering domains may be selected from the list of amino acid sequences according to SEQ ID NOs: 1116-1167 of the patent application WO2017/081082, or fragments or variants of these sequences.

[0156] In preferred embodiments, the coding RNA of the invention encodes at least one antigenic protein of a Rotavirus as defined herein, and additionally encodes at least one heterologous transmembrane domain. A heterologous transmembrane domain promote membrane anchoring of the encoded Rotavirus antigen, preferably VP8*, and may thereby enhance the immune response (in particular cellular immune responses).

[0157] Suitably, the transmembrane domain is or is derived from an influenza HA transmembrane domain, preferably derived from an influenza A HAH1N1, more preferably from H1N1/A/Netherlands/602/2009, TM domain_HA, aa521-566, NCBI Acc. No.: ACQ45338.1, CY039527.1).

[0158] Further suitable transmembrane domains are derived from Human immunodeficiency virus 1, TM domain_Env, TM domain, aa19-35, BAF32550.1, AB253679.1; Human immunodeficiency virus 1, TM domain_Env, TM domain, aa515-536, BAF32550.1, AB253679.1; Human immunodeficiency virus 1, TM domain_Env, TM domain, aa680-702, BAF32550.1, AB253679.1; Equine infectious anemia virus, TM domain_Env, TM domain, aa450-472, AAC03762.1, AF016316.1; Equine infectious anemia virus, TM domain_Env, TM domain, aa614-636, AAC03762.1, AF016316.1; Equine infectious anemia virus, TM domain_Env, TM domain, aa798-819, AAC03762.1, AF016316.1; Murine leukemia virus, TM domain_Env, TM domain, AAA46526.1, M93052.1; Mouse mammary tumor virus, TM domain_Env, TM domain, BAA03768.1, D16249.1; Mouse mammary tumor virus, TM domain_Env, TM domain, NP_056883.1, NC_001503.1; Vesicular stomatitis virus, TM domain_G, TM domain, CAA24525.1, V01214.1; Rabies virus, TM domain_G, TM domain, AEV43288.1, JN234423.1.

[0159] In embodiments where the coding RNA of the invention additionally encodes heterologous transmembrane domain, it is particularly preferred and suitable to generate a fusion protein comprising a C-terminal heterologous transmembrane domain, optionally a linker element, and an N-terminal peptide or protein derived from VP8*. Constructs comprising heterologous transmembrane domain may promote membrane anchoring of the antigen and may therefore promote immune responses, in particular cellular immune responses, of the RNA encoding the Rotavirus antigen, preferably VP8*. Additionally, such constructs may additionally comprise an N-terminal secretory signal sequence (as defined above). Alternatively, the transmembrane domain may be in the N-terminus.

[0160] Further transmembrane elements/domains may be selected from the list of amino acid sequences according to SEQ ID NOs: 1228-1343 of the patent application WO2017/081082, or fragments or variants of these sequences.

[0161] A suitable examples of a Rotavirus VP8* construct comprising a heterologous transmembrane elements/domains is SP-IgE_P2_VP8*(41-223)_TM domain-HA. The corresponding amino acid sequence for the construct can be found in Table 1.

[0162] In preferred embodiments, the coding RNA of the invention additionally encodes at least one heterologous peptide linker element.

[0163] In preferred embodiments, the coding RNA of the invention may comprise at least one Rotavirus protein or fragment as defined above, and, at least one peptide linker element, wherein the peptide linker may be selected from the list of amino acid sequences according to SEQ ID NOs: 1509-1565 of the patent application WO2017/081082, or fragments or variants of these sequences.

[0164] In particularly preferred embodiments, the heterologous peptide linker element is selected from SEQ ID NOs: 1769, 1770 or 1771.

[0165] Suitable Examples of Rotavirus VP8* constructs comprising at least one peptide linker element are P2_VP8*(65-223), P2_VP8*(41-223), P2_VP8*(65-223)_Ferritin, P2_VP8*(41-223)_Ferritin, LumSynt_P2_VP8*(65-223), LumSynt_P2_VP8*(41-223), SP-IgE_P2_VP8*(65-223), SP-IgE_P2_VP8*(41-223). The corresponding amino acid sequences for each of the above listed constructs can be found in Table 1.

[0166] In preferred embodiments, the coding RNA for a Rotavirus vaccine comprises at least one coding sequence encoding the following protein elements, preferably in N-terminal to C-terminal direction:
[0167] a) helper epitope, VP8*protein or VP8*fragment; or
[0168] b) helper epitope, VP8*protein or VP8*fragment; antigen clustering domain; or
[0169] c) signal peptide, helper epitope, VP8*protein or fragment thereof; or
[0170] d) signal peptide, helper epitope, VP8*protein or VP8*fragment, antigen clustering domain; or
[0171] e) signal peptide, helper epitope, VP8*protein or VP8*fragment, transmembrane domain; or
[0172] f) antigen clustering domain, helper epitope; VP8*protein or VP8*fragment.

[0173] In particularly preferred embodiments, the coding RNA for a Rotavirus vaccine comprises at least one coding sequence encoding the following elements in N-terminal to C-terminal direction:
[0174] a) P2 helper epitope, VP8*fragment; or
[0175] b) P2 helper epitope, VP8*fragment, antigen clustering domain (e.g. ferritin); or
[0176] c) IgE signal peptide, P2 helper epitope, VP8*fragment; or
[0177] d) IgE signal peptide, P2 helper epitope, VP8*fragment, antigen clustering domain (e.g. ferritin); or
[0178] e) IgE signal peptide, P2 helper epitope, VP8*fragment, HA transmembrane domain; or
[0179] f) antigen clustering domain (e.g. lumazine synthase), P2 helper epitope, VP8*fragment.

[0180] In particularly preferred embodiments, the coding RNA for a Rotavirus vaccine comprises at least one coding sequence encoding the following elements in N-terminal to C-terminal direction:
[0181] a) P2 helper epitope, VP8*fragment; or
[0182] b) P2 helper epitope, VP8*fragment, antigen clustering domain ferritin; or
[0183] c) IgE signal peptide, P2 helper epitope, VP8*fragment; or
[0184] d) IgE signal peptide, P2 helper epitope, VP8*fragment, HA transmembrane domain; or
[0185] e) antigen clustering domain lumazine synthase, P2 helper epitope, VP8*fragment.

[0186] In embodiments, the elements mentioned above may be connected via one or more (peptide) linker elements as defined above. For example: IgE signal peptide-linker-P2 helper epitope-linker-VP8*fragment or IgE signal peptide-P2 helper epitope-linker-VP8*fragment or IgE signal peptide-linker-P2 helper epitope-VP8*fragment.

[0187] In particularly preferred embodiments, the coding RNA for a Rotavirus vaccine comprises at least one coding sequence encoding the following elements in N-terminal to C-terminal direction:
[0188] a) P2 helper epitope, peptide linker, VP8*fragment; or
[0189] b) P2 helper epitope, peptide linker, VP8*fragment, peptide linker, antigen clustering domain ferritin; or
[0190] c) IgE signal peptide, P2 helper epitope, peptide linker, VP8*fragment; or
[0191] d) IgE signal peptide, P2 helper epitope, peptide linker, VP8*fragment, peptide linker, HA transmembrane domain; or
[0192] e) antigen clustering domain lumazine synthase, peptide linker, P2 helper epitope, peptide linker, VP8*fragment.

[0193] A detailed description of particularly preferred and suitable Rotavirus antigen constructs is provided in Table 1.

[0194] In Table 1 all references made to amino acid (aa) residues and their position in an VP8* protein relates to the position of the respective aa residue in a corresponding VP8* full length protein according to reference VP8* of BE1128, SEQ ID NO: 24). Moreover, the abbreviations used to describe suitable VP8* antigen designs/constructs of Table 1 are also used throughout the description of the invention (as described above) as well as in the ST.25 sequence listing.

[0195] Column A of Table 1 provides a short description of VP4 and of suitable VP8* antigen constructs (Table X1 describes the therefore used heterologous fragments). Column B of Table 1 provides a description of the Rotavirus of which the respective VP8* is derived from. Column C of Table 1 indicates the amino acid stretch or stretches for each of the respective antigen designs corresponding to the full length VP8* reference (SEQ ID NO: 24). Column D of Table 1 provides protein SEQ ID NOs of respective VP8* antigen constructs. Preferred coding sequences (cds) encoding the constructs of Table 1 are provided in Table 3. Preferred coding RNA/mRNA sequences are provided in Table 4.

TABLE 1
Preferred Rotavirus VP8* antigen protein constructs

| A | B | C | D |
|---|---|---|---|
| VP4 | RVA/BE1058/P[4] | aa1-775 | 10 |
| VP4 | RVA/DS-1/P[4] | aa1-775 | 11 |
| VP4 | RVA/DS-1/P[4] | aa1-775 | 12 |
| VP4 | RVA/F01322/P[6] | aa1-775 | 13 |
| VP4 | RVA/1076/P[6] | aa1-775 | 14 |
| VP4 | RVA/BE1128/P[8] | aa1-775 | 15 |
| VP4 | RVA/Wa-VirWa/P[8] | aa1-775 | 16 |
| VP4 | RVA/Wa/P[8] | aa1-775 | 17 |
| VP4 | RVA/Wa/P[8] | aa1-775 | 18 |
| VP8* | RVA/BE1058/P[4] | aa1-240 | 9, 19 |
| VP8* | RVA/DS-1/P[4] | aa1-240 | 20 |
| VP8* | RVA/DS-1/P[4] | aa1-240 | 21 |
| VP8* | RVA/F01322/P[6] | aa1-240 | 8, 22 |
| VP8* | RVA/1076/P[6] | aa1-240 | 23 |
| VP8* | RVA/BE1128/P[8] | aa1-240 | 7, 24 |
| VP8* | RVA/Wa-VirWa/P[8] | aa1-240 | 25 |
| VP8* | RVA/Wa/P[8] | aa1-240 | 26 |
| VP8* | RVA/Wa/P[8] | aa1-240 | 27 |
| VP8*(65-223) | RVA/BE1058/P[4] | aa65-223 | 28 |
| VP8*(65-223) | RVA/DS-1/P[4] | aa65-223 | 29 |
| VP8*(65-223) | RVA/DS-1/P[4] | aa65-223 | 30 |
| VP8*(65-223) | RVA/F01322/P[6] | aa65-223 | 31 |
| VP8*(65-223) | RVA/1076/P[6] | aa65-223 | 32 |
| VP8*(65-223) | RVA/BE1128/P[8] | aa65-223 | 33 |
| VP8*(65-223) | RVA/Wa-VirWa/P[8] | aa65-223 | 34 |
| VP8*(65-223) | RVA/Wa/P[8] | aa65-223 | 35 |
| VP8*(65-223) | RVA/wa/P[8] | aa65-223 | 36 |
| VP8*(41-223) | RVA/BE1058/P[4] | aa41-223 | 37 |
| VP8*(41-223) | RVA/DS-1/P[4] | aa41-223 | 38 |
| VP8*(41-223) | RVA/DS-1/P[4] | aa41-223 | 39 |
| VP8*(41-223) | RVA/F01322/P[6] | aa41-223 | 40 |
| VP8*(41-223) | RVA/1076/P[6] | aa41-223 | 41 |
| VP8*(41-223) | RVA/BE1128/P[8] | aa41-223 | 42 |
| VP8*(41-223) | RVA/Wa-VirWa/P[8] | aa41-223 | 43 |
| VP8*(41-223) | RVA/Wa/P[8] | aa41-223 | 44 |
| VP8*(41-223) | RVA/Wa/P[8] | aa41-223 | 45 |
| P2_VP8*(65-223) | RVA/BE1058/P[4] | aa65-223 | 6, 46 |
| P2_VP8*(65-223) | RVA/DS-1/P[4] | aa65-223 | 47 |
| P2_VP8*(65-223) | RVA/DS-1/P[4] | aa65-223 | 48 |
| P2_VP8*(65-223) | RVA/F01322/P[6] | aa65-223 | 5, 49 |
| P2_VP8*(65-223) | RVA/1076/P[6] | aa65-223 | 50 |
| P2_VP8*(65-223) | RVA/BE1128/P[8] | aa65-223 | 4, 51 |
| P2_VP8*(65-223) | RVA/Wa-VirWa/P[8] | aa65-223 | 52 |
| P2_VP8*(65-223) | RVA/Wa/P[8] | aa65-223 | 53 |
| P2_VP8*(65-223) | RVA/Wa/P[8] | aa65-223 | 54 |
| P2_VP8*(41-223) | RVA/BE1058/P[4] | aa41-223 | 55 |
| P2_VP8*(41-223) | RVA/DS-1/P[4] | aa41-223 | 56 |
| P2_VP8*(41-223) | RVA/DS-1/P[4] | aa41-223 | 57 |
| P2_VP8*(41-223) | RVA/F01322/P[6] | aa41-223 | 58 |
| P2_VP8*(41-223) | RVA/1076/P[6] | aa41-223 | 59 |
| P2_VP8*(41-223) | RVA/BE1128/P[8] | aa41-223 | 60 |
| P2_VP8*(41-223) | RVA/Wa-VirWa/P[8] | aa41-223 | 61 |
| P2_VP8*(41-223) | RVA/Wa/P[8] | aa41-223 | 62 |
| P2_VP8*(41-223) | RVA/Wa/P[8] | aa41-223 | 63 |
| P2_VP8*(65-223)_Ferritin | RVA/BE1058/P[4] | aa65-223 | 64 |
| P2_VP8*(65-223)_Ferritin | RVA/DS-1/P[4] | aa65-223 | 65 |
| P2_VP8*(65-223)_Ferritin | RVA/DS-1/P[4] | aa65-223 | 66 |
| P2_VP8*(65-223)_Ferritin | RVA/F01322/P[6] | aa65-223 | 67 |
| P2_VP8*(65-223)_Ferritin | RVA/1076/P[6] | aa65-223 | 68 |
| P2_VP8*(65-223)_Ferritin | RVA/BE1128/P[8] | aa65-223 | 69 |
| P2_VP8*(65-223)_Ferritin | RVA/Wa-VirWa/P[8] | aa65-223 | 70 |
| P2_VP8*(65-223)_Ferritin | RVA/Wa/P[8] | aa65-223 | 71 |
| P2_VP8*(65-223)_Ferritin | RVA/Wa/P[8] | aa65-223 | 72 |
| P2_VP8*(41-223)_Ferritin | RVA/BE1058/P[4] | aa41-223 | 73 |
| P2_VP8*(41-223)_Ferritin | RVA/DS-1/P[4] | aa41-223 | 74 |
| P2_VP8*(41-223)_Ferritin | RVA/DS-1/P[4] | aa41-223 | 75 |
| P2_VP8*(41-223)_Ferritin | RVA/F01322/P[6] | aa41-223 | 76 |
| P2_VP8*(41-223)_Ferritin | RVA/1076/P[6] | aa41-223 | 77 |
| P2_VP8*(41-223)_Ferritin | RVA/BE1128/P[8] | aa41-223 | 78 |
| P2_VP8*(41-223)_Ferritin | RVA/Wa-VirWa/P[8] | aa41-223 | 79 |
| P2_VP8*(41-223)_Ferritin | RVA/Wa/P[8] | aa41-223 | 80 |
| P2_VP8*(41-223)_Ferritin | RVA/Wa/P[8] | aa41-223 | 81 |
| LumSynt_P2_VP8*(65-223) | RVA/BE1058/P[4] | aa65-223 | 82 |
| LumSynt_P2_VP8*(65-223) | RVA/DS-1/P[4] | aa65-223 | 83 |
| LumSynt_P2_VP8*(65-223) | RVA/DS-1/P[4] | aa65-223 | 84 |
| LumSynt_P2_VP8*(65-223) | RVA/F01322/P[6] | aa65-223 | 85 |
| LumSynt_P2_VP8*(65-223) | RVA/1076/P[6] | aa65-223 | 86 |
| LumSynt_P2_VP8*(65-223) | RVA/BE1128/P[8] | aa65-223 | 87 |
| LumSynt_P2_VP8*(65-223) | RVA/Wa-VirWa/P[8] | aa65-223 | 88 |
| LumSynt_P2_VP8*(65-223) | RVA/Wa/P[8] | aa65-223 | 89 |
| LumSynt_P2_VP8*(65-223) | RVA/Wa/P[8] | aa65-223 | 90 |
| LumSynt_P2_VP8*(41-223) | RVA/BE1058/P[4] | aa41-223 | 3, 91 |
| LumSynt_P2_VP8*(41-223) | RVA/DS-1/P[4] | aa41-223 | 92 |
| LumSynt_P2_VP8*(41-223) | RVA/DS-1/P[4] | aa41-223 | 93 |
| LumSynt_P2_VP8*(41-223) | RVA/F01322/P[6] | aa41-223 | 2, 94 |
| LumSynt_P2_VP8*(41-223) | RVA/1076/P[6] | aa41-223 | 95 |
| LumSynt_P2_VP8*(41-223) | RVA/BE1128/P[8] | aa41-223 | 1, 96 |
| LumSynt_P2_VP8*(41-223) | RVA/Wa-VirWa/P[8] | aa41-223 | 97 |
| LumSynt_P2_VP8*(41-223) | RVA/Wa/P[8] | aa41-223 | 98 |
| LumSynt_P2_VP8*(41-223) | RVA/Wa/P[8] | aa41-223 | 99 |
| SP-IgE_P2_VP8*(65-223) | RVA/BE1058/P[4] | aa65-223 | 100 |
| SP-IgE_P2_VP8*(65-223) | RVA/DS-1/P[4] | aa65-223 | 101 |
| SP-IgE_P2_VP8*(65-223) | RVA/DS-1/P[4] | aa65-223 | 102 |
| SP-IgE_P2_VP8*(65-223) | RVA/F01322/P[6] | aa65-223 | 103 |
| SP-IgE_P2_VP8*(65-223) | RVA/1076/P[6] | aa65-223 | 104 |
| SP-IgE_P2_VP8*(65-223) | RVA/BE1128/P[8] | aa65-223 | 105 |
| SP-IgE_P2_VP8*(65-223) | RVA/Wa-VirWa/P[8] | aa65-223 | 106 |
| SP-IgE_P2_VP8*(65-223) | RVA/Wa/P[8] | aa65-223 | 107 |
| SP-IgE_P2_VP8*(65-223) | RVA/Wa/P[8] | aa65-223 | 108 |
| SP-IgE_P2_VP8*(41-223) | RVA/BE1058/P[4] | aa41-223 | 109 |
| SP-IgE_P2_VP8*(41-223) | RVA/DS-1/P[4] | aa41-223 | 110 |
| SP-IgE_P2_VP8*(41-223) | RVA/DS-1/P[4] | aa41-223 | 111 |
| SP-IgE_P2_VP8*(41-223) | RVA/F01322/P[6] | aa41-223 | 112 |
| SP-IgE_P2_VP8*(41-223) | RVA/1076/P[6] | aa41-223 | 113 |
| SP-IgE_P2_VP8*(41-223) | RVA/BE1128/P[8] | aa41-223 | 114 |
| SP-IgE_P2_VP8*(41-223) | RVA/Wa-VirWa/P[8] | aa41-223 | 115 |
| SP-IgE_P2_VP8*(41-223) | RVA/Wa/P[8] | aa41-223 | 116 |
| SP-IgE_P2_VP8*(41-223) | RVA/Wa/P[8] | aa41-223 | 117 |
| P2_VP8*(64-223) | RVA/BE1058/P[4] | aa64-223 | 1899 |
| P2_VP8*(64-223) | RVA/F01322/P[6] | aa64-223 | 1900 |

[0196] Table X1 provides a short description of suitable heterologous elements for VP8* antigen constructs, information regarding the origin and preferred protein and coding sequences (opt1, opt4, opt5).

TABLE X1
Suitable heterologous elements for VP8* antigen constructs

| | | Amino | NCBI Accession | | CDS | CDS | CDS |
|---|---|---|---|---|---|---|---|
| Organism | Heterologous Element | Acids | No. Protein | PRT | opt1 | opt4 | opt5 |
| Homo | signal peptide_IgE (SP-IgE) | aa1-18 | AAB59424.1 | 1738 | 1741 | 1744 | 1747 |
| sapiens | | | | | | | |
| Homo | signal peptide_HsPLAT | aa1-22 | AAA61213.1 | 1739 | 1742 | 1745 | 1748 |
| sapiens | | | | | | | |
| Homo | signal peptide_HsALB | aa1-18 | NP_000468.1 | 1740 | 1743 | 1746 | 1749 |
| sapiens | | | | | | | |
| Clostridium | P2 helper peptide (P2) | aa830-844 | WP_023439719.1 | 1750 | 1751 | 1752 | 1753 |
| tetani/E88 | | | | | | | |
| Artificial | PADRE helper epitope | aa1-13 | | 1754 | 1755, | 1757 | 1758 |
| | | | | | 1756 | | |
| Aquifex | lumazine synthase | aa1-154 | | 1759 | 1760, | 1762 | 1763 |
| aeolicus/VF5 | (LumSynt) (LS) | | | | 1761 | | |
| Helicobacter | Ferritin | aa5-167 | | 1764 | 1765, | 1767 | 1768 |
| pylori/J99 | | | | | 1766 | | |
| Artificial | peptide linker 3 | aa1-5 | | 1769 | 1772 | 1775 | 1778 |
| Artificial | peptide linker 6 | aa1-15 | | 1770 | 1773 | 1776 | 1779 |
| Artificial | peptide linker 9 | aa1-3 | | 1771 | 1774 | 1777 | 1780 |

[0197] In various embodiments, the coding RNA of the first aspect comprises at least one coding sequence encoding at least one antigenic peptide or protein of Rotavirus comprising or consisting of at least one amino acid sequence being identical or at least 70%, 80%, 85%, 86%, 87%, 88%, 89%, 90%0, 91%, 92%, 93%, 94%, 95%, 96%, 97%, 98%, or 99% identical to any one of SEQ ID NOs: 1-117, 1899, 1900, or an immunogenic fragment or immunogenic variant of any of these sequences. Additional information regarding each of these suitable amino acid sequences encoding Rotavirus antigens may also be derived from the sequence listing, in particular from the details provided therein under identifier <223> as explained in the following.

[0198] In various embodiments, the coding RNA of the first aspect comprises at least one coding sequence encoding at least one antigenic peptide or protein of Rotavirus and at least one coding sequence encoding a P2 helper epitope comprising or consisting of at least one amino acid sequences being identical or at least 70%, 80%, 85%, 86%, 87%, 88%, 89%, 90%, 91%, 92%, 93%, 94%, 95%, 96%, 97%, 98%, or 99% identical to any one of SEQ ID NOs: 1-6, 46-117, 1899, 1900, or an immunogenic fragment or immunogenic variant of any of these sequences. Additional information regarding each of these suitable amino acid sequences encoding Rotavirus antigens may also be derived from the sequence listing, in particular from the details provided therein under identifier <223> as explained in the following.

[0199] In various embodiments, the coding RNA of the first aspect comprises at least one coding sequence encoding at least one antigenic peptide or protein of Rotavirus and at least one coding sequence encoding the antigen clustering domain ferritin comprising or consisting of at least one amino acid sequences being identical or at least 70%, 80%, 85%, 86%, 87%, 88%, 89%, 90%, 91%, 92%, 93%, 94%, 95%, 96%, 97%, 98%, or 99% identical to any one of SEQ ID NOs: 64-81, or an immunogenic fragment or immunogenic variant of any of these sequences. Additional information regarding each of these suitable amino acid sequences encoding Rotavirus antigens may also be derived from the sequence listing, in particular from the details provided therein under identifier <223> as explained in the following.

[0200] In various embodiments, the coding RNA of the first aspect comprises at least one coding sequence encoding at least one antigenic peptide or protein of Rotavirus and at least one coding sequence encoding the antigen clustering domain lumazine synthase epitope comprising or consisting of at least one amino acid sequences being identical or at least 70%, 80%, 85%, 86%, 87%, 88%, 89%, 90%, 91%, 92%, 93%, 94%, 95%, 96%, 97%, 98%, or 99% identical to any one of SEQ ID NOs: 1-3, 82-99, or an immunogenic fragment or immunogenic variant of any of these sequences. Additional information regarding each of these suitable amino acid sequences encoding Rotavirus antigens may also be derived from the sequence listing, in particular from the details provided therein under identifier <223> as explained in the following.

[0201] In various embodiments, the coding RNA of the first aspect comprises at least one coding sequence encoding at least one antigenic peptide or protein of Rotavirus and at least one coding sequence encoding a secretory signal peptide comprising or consisting of at least one amino acid sequences being identical or at least 70%, 80%, 85%, 86%, 87%, 88%, 89%, 90%, 91%, 92%, 93%, 94%, 95%, 96%, 97%, 98%, or 99% identical to any one of SEQ ID NOs: 100-117, or an immunogenic fragment or immunogenic variant of any of these sequences. Additional information regarding each of these suitable amino acid sequences encoding Rotavirus antigens may also be derived from the sequence listing, in particular from the details provided therein under identifier <223> as explained in the following.

[0202] In various embodiments, the coding RNA of the first aspect comprises at least one coding sequence encoding at least one secreted antigenic peptide or protein of Rotavirus and at least one coding sequence encoding a secretory signal peptide or the antigen clustering domain lumazine synthase epitope comprising or consisting of at least one amino acid sequences being identical or at least 70%, 80%, 85%, 86%, 87%, 88%, 89%, 90%, 91%, 92%, 93%, 94%, 95%, 96%, 97%, 98%, or 99% identical to any one of SEQ ID NOs: 1-3, 82-99, 100-117, or an immunogenic fragment or immunogenic variant of any of these sequences. Additional information regarding each of these suitable amino acid sequences encoding Rotavirus antigens may also be derived from the sequence listing, in particular from the details provided therein under identifier <223> as explained in the following.

[0203] In various embodiments, the coding RNA of the first aspect comprises at least one coding sequence encoding at least one cytoplasmic (not secreted) antigenic peptide or protein of Rotavirus comprising or consisting of at least one amino acid sequences being identical or at least 70%, 80%, 85%, 86%, 87%, 88%, 89%, 90%, 91%, 92%, 93%, 94%, 95%, 96%, 97%, 98%, or 99% identical to any one of SEQ ID NOs: 28-81, or an immunogenic fragment or immunogenic variant of any of these sequences. Additional information regarding each of these suitable amino acid sequences encoding Rotavirus antigens may also be derived from the sequence listing, in particular from the details provided therein under identifier <223> as explained in the following.

[0204] In preferred embodiments, the coding RNA of the first aspect comprises at least one coding sequence encoding at least one antigenic peptide or protein of Rotavirus comprising or consisting of at least one amino acid sequences being identical or at least 70%, 80%, 85%, 86%, 87%, 88%, 89%, 90%, 91%, 92%, 93%, 94%, 95%, 96%, 97%, 98%, or 99% identical to any one of SEQ ID NOs: 1-3, 4-6, 46-54, 64-72, 91-99 or 109-117, or an immunogenic fragment or immunogenic variant of any of these sequences. Additional information regarding each of these suitable amino acid sequences encoding Rotavirus antigens may also be derived from the sequence listing, in particular from the details provided therein under identifier <223> as explained in the following.

[0205] In other embodiments, the coding RNA of the first aspect comprises at least one coding sequence encoding at least one antigenic peptide or protein comprising or consisting of at least one amino acid sequences being identical or at least 70%, 80%, 85%, 86%, 87%, 88%, 89%, 90%, 91%, 92%, 93%, 94%, 95%, 96%, 97%, 98%, or 99% identical to any one of SEQ ID NOs: 1-827 of WO2017/081110A1 or a fragment or variant of any of these sequences. In this context SEQ ID NOs: 1-827 of WO2017/081110A1 and the disclosure related thereto herewith incorporated by reference.

[0206] Suitable Coding Sequences:

[0207] According to preferred embodiments, the coding RNA comprises at least one coding sequence encoding at least one antigenic protein as defined herein, preferably VP8*, or fragments and variants thereof. In that context, any coding sequence encoding at least one antigenic protein as defined herein, preferably VP8*, or fragments and variants thereof may be understood as suitable coding sequence and may therefore be comprised in the coding RNA of the invention.

[0208] In preferred embodiments, the coding RNA of the first aspect may comprise or consist of at least one coding sequence encoding at least one antigenic peptide or protein from VP8* as defined herein, preferably encoding any one of SEQ ID NOs: 1-117, 1899, 1900 or fragments of variants thereof. It has to be understood that, on nucleic acid level, any RNA sequence which encodes an amino acid sequences being identical or at least 70%, 80%, 85%, 86%, 87%, 88%, 89%, 90%, 91%, 92%, 93%, 94%, 95%, 96%, 97%, 98%, or 99% identical to any one of SEQ ID NOs: 1-117, 1899, 1900 or fragments or variants thereof, may be selected and may accordingly be understood as suitable coding sequence and may therefore be comprised in the coding RNA of the first aspect.

[0209] In preferred embodiments, the coding RNA of the first aspect may comprise or consist of at least one coding sequence encoding any one of SEQ ID NOs: 1-6, 46-54, 64-72, 91-99 or 109-117 or fragments of variants thereof. It has to be understood that, on nucleic acid level, any RNA sequence which encodes an amino acid sequences being identical or at least 70%, 80%, 85%, 86%, 87%, 88%, 89%, 90%, 91%, 92%, 93%, 94%, 95%, 96%, 97%, 98%, or 99% identical to any one of SEQ ID NOs: 1-6, 46-54, 64-72, 91-99 or 109-117 or fragments or variants thereof, may be selected and may accordingly be understood as suitable coding sequence and may therefore be comprised in the coding RNA of the first aspect.

[0210] In other embodiments, the coding RNA of the first aspect may comprise or consist of at least one coding sequence encoding any one of SEQ ID NOs: 1-827 of WO2017/081110A1 or fragments of variants thereof. It has to be understood that, on nucleic acid level, any RNA sequence which encodes an amino acid sequences being identical or at least 70%, 80%, 85%, 86%, 87%, 88%, 89%, 90%, 91%, 92%, 93%, 94%, 95%, 96%, 97%, 98%, or 99% identical to any one of SEQ ID NOs: 1-827 of WO2017/081110A1 or fragments or variants thereof, may be selected and may accordingly be understood as suitable coding sequence and may therefore be comprised in the coding RNA of the invention.

[0211] In preferred embodiments, the coding RNA of the first aspect comprises a coding sequence that comprises at least one of the nucleic acid sequences being identical or at least 70%, 80%, 85%, 86%, 87%, 88%, 89%, 90%, 91%, 92%, 93%, 94%, 95%, 96%, 97%, 98%, or 99% identical to SEQ ID NOs: 118-585, 1901-1906, or a fragment or a fragment or variant of any of these sequences. Additional information regarding each of these suitable nucleic acid sequences encoding may also be derived from the sequence listing, in particular from the details provided therein under identifier <223>.

[0212] In other embodiments, the coding RNA of the first aspect comprises a coding sequence that comprises at least one of the nucleic acid sequences being identical or at least 70%, 80%, 85%, 86%, 87%, 88%, 89%, 90%, 91%, 92%, 93%, 94%, 95%, 96%, 97%, 98%, or 99% identical to any one of the nucleic acid sequences provided in Tables 2, 4, 6, 8, 10-13, 15, 17, and 19 of WO2017/081110A1 or a fragment or a fragment or variant of any of these sequences. The respective nucleic acid sequences provided in Tables 2, 4, 6, 8, 10-13, 15, 17, and 19 of WO2017/081110A1, and the disclosure relating thereto, herewith incorporated by reference.

[0213] In preferred embodiments, the coding RNA of the first aspect is an artificial RNA.

[0214] The term “artificial RNA” as used herein is intended to refer to an RNA that does not occur naturally. In other words, an artificial RNA may be understood as a non-natural RNA molecule. Such RNA molecules may be non-natural due to its individual sequence (e.g. G/C content modified coding sequence, UTRs) and/or due to other modifications, e.g. structural modifications of nucleotides. Typically, artificial RNA may be designed and/or generated by genetic engineering to correspond to a desired artificial sequence of nucleotides. In this context an artificial RNA is a sequence that may not occur naturally, i.e. a sequence that differs from the wild type sequence/the naturally occurring sequence by at least one nucleotide. The term “artificial RNA” is not restricted to mean “one single molecule” but is understood to comprise an ensemble of essentially identical RNA molecules. Accordingly, it may relate to a plurality of essentially identical RNA molecules.

[0215] In preferred embodiments, the coding RNA of the first aspect is a modified and/or stabilized RNA, preferably a modified and/or stabilized artificial RNA

[0216] According to preferred embodiments, the RNA of the present invention may thus be provided as a “stabilized artificial RNA” or “stabilized coding RNA” that is to say an RNA showing improved resistance to in vivo degradation and/or an RNA showing improved stability in vivo, and/or an RNA showing improved translatability in vivo. In the following, specific suitable modifications/adaptations in this context are described which are suitably to “stabilize” the RNA.

[0217] Such stabilization may be effected by providing a “dried RNA” and/or a “purified RNA” as specified herein. Alternatively or in addition to that, such stabilization can be effected, for example, by a modified phosphate backbone of the coding RNA of the present invention. A backbone modification in connection with the present invention is a modification in which phosphates of the backbone of the nucleotides contained in the RNA are chemically modified. Nucleotides that may be preferably used in this connection contain e.g. a phosphorothioate-modified phosphate backbone, preferably at least one of the phosphate oxygens contained in the phosphate backbone being replaced by a sulfur atom. Stabilized RNAs may further include, for example: non-ionic phosphate analogues, such as, for example, alkyl and aryl phosphonates, in which the charged phosphonate oxygen is replaced by an alkyl or aryl group, or phosphodiesters and alkylphosphotriesters, in which the charged oxygen residue is present in alkylated form. Such backbone modifications typically include, without implying any limitation, modifications from the group consisting of methylphosphonates, phosphoramidates and phosphorothioates (e.g. cytidine-5′-O-(1-thiophosphate)).

[0218] In the following, suitable modifications are described that are capable of “stabilizing” the RNA of the invention.

[0219] According to embodiments, the coding RNA is a modified RNA, wherein the modification refers to chemical modifications comprising backbone modifications as well as sugar modifications or base modifications.

[0220] A modified RNA may comprise nucleotide analogues/modifications, e.g. backbone modifications, sugar modifications or base modifications. A backbone modification in the context of the invention is a modification, in which phosphates of the backbone of the nucleotides of the RNA are chemically modified. A sugar modification in the context of the invention is a chemical modification of the sugar of the nucleotides of the RNA. Furthermore, a base modification in the context of the invention is a chemical modification of the base moiety of the nucleotides of the RNA. In this context, nucleotide analogues or modifications are preferably selected from nucleotide analogues which are applicable for transcription and/or translation.

[0221] In particularly preferred embodiments, the nucleotide analogues/modifications which may be incorporated into a modified RNA as described herein are preferably selected from 2-amino-6-chloropurineriboside-5′-triphosphate, 2-Aminopurine-riboside-5′-triphosphate; 2-aminoadenosine-5′-triphosphate, 2′-Amino-2′-deoxycytidine-triphosphate, 2-thiocytidine-5′-triphosphate, 2-thiouridine-5′-triphosphate, 2′-Fluorothymidine-5′-triphosphate, 2′-0-Methyl-inosine-5′-triphosphate 4-thiouridine-5′-triphosphate, 5-aminoallylcytidine-5′-triphosphate, 5-aminoallyluridine-5′-triphosphate, 5-bromocytidine-5′-triphosphate, 5-bromouridine-5′-triphosphate, 5-Bromo-2′-deoxycytidine-5′-triphosphate, 5-Bromo-2′-deoxyuridine-5′-triphosphate, 5-iodocytidine-5′-triphosphate, 5-Iodo-2′-deoxycytidine-5′-triphosphate, 5-iodouridine-5′-triphosphate, 5-Iodo-2′-deoxyuridine-5′-triphosphate, 5-methylcytidine-5′-triphosphate, 5-methyluridine-5′-triphosphate, 5-Propynyl-2′-deoxycytidine-5′-triphosphate, 5-Propynyl-2′-deoxyuridine-5′-triphosphate, 6-azacytidine-5′-triphosphate, 6-azauridine-5′-triphosphate, 6-chloropurineriboside-5′-triphosphate, 7-deazaadenosine-5′-triphosphate, 7-deazaguanosine-5′-triphosphate, 8-azaadenosine-5′-triphosphate, 8-azidoadenosine-5′-triphosphate, benzimidazole-riboside-5′-triphosphate, N1-methyladenosine-5′-triphosphate, N1-methylguanosine-5′-triphosphate, N6-methyladenosine-5′-triphosphate, 06-methylguanosine-5′-triphosphate, pseudouridine-5′-triphosphate, or puromycin-5′-triphosphate, xanthosine-5-triphosphate. Particular preference is given to nucleotides for base modifications selected from the group of base-modified nucleotides consisting of 5-methylcytidine-5′-triphosphate, 7-deazaguanosine-5′-triphosphate, 5-bromocytidine-5′-triphosphate, and pseudouridine-5′-triphosphate, pyridin-4-one ribonucleoside, 5-aza-uridine, 2-thio-5-aza-uridine, 2-thiouridine, 4-thio-pseudouridine, 2-thio-pseudouridine, 5-hydroxyuridine, 3-methyluridine, 5-carboxymethyl-uridine, 1-carboxymethyl-pseudouridine, 5-propynyl-uridine, 1-propynyl-pseudouridine, 5-taurinomethyluridine, 1-taurinomethyl-pseudouridine, 5-taurinomethyl-2-thio-uridine, 1-taurinomethyl-4-thio-uridine, 5-methyl-uridine, 1-methyl-pseudouridine, 4-thio-1-methyl-pseudouridine, 2-thio-1-methyl-pseudouridine, 1-methyl-1-deaza-pseudouridine, 2-thio-1-methyl-1-deaza-pseudouridine, dihydrouridine, dihydropseudouridine, 2-thio-dihydrouridine, 2-thio-dihydropseudouridine, 2-methoxyuridine, 2-methoxy-4-thio-uridine, 4-methoxy-pseudouridine, and 4-methoxy-2-thio-pseudouridine, 5-aza-cytidine, pseudoisocytidine, 3-methyl-cytidine, N4-acetylcytidine, 5-formylcytidine, N4-methylcytidine, 5-hydroxymethylcytidine, 1-methyl-pseudoisocytidine, pyrrolo-cytidine, pyrrolo-pseudoisocytidine, 2-thio-cytidine, 2-thio-5-methyl-cytidine, 4-thio-pseudoisocytidine, 4-thio-1-methyl-pseudoisocytidine, 4-thio-1-methyl-1-deaza-pseudoisocytidine, 1-methyl-1-deaza-pseudoisocytidine, zebularine, 5-aza-zebularine, 5-methyl-zebularine, 5-aza-2-thio-zebularine, 2-thio-zebularine, 2-methoxy-cytidine, 2-methoxy-5-methyl-cytidine, 4-methoxy-pseudoisocytidine, and 4-methoxy-1-methyl-pseudoisocytidine, 2-aminopurine, 2, 6-diaminopurine, 7-deaza-adenine, 7-deaza-8-aza-adenine, 7-deaza-2-aminopurine, 7-deaza-8-aza-2-aminopurine, 7-deaza-2,6-diaminopurine, 7-deaza-8-aza-2,6-diaminopurine, 1-methyladenosine, N6-methyladenosine, N6-isopentenyladenosine, N6-(cis-hydroxyisopentenyl)adenosine, 2-methylthio-N6-(cis-hydroxyisopentenyl) adenosine, N6-glycinylcarbamoyladenosine, N6-threonylcarbamoyladenosine, 2-methylthio-N6-threonyl carbamoyladenosine, N6,N6-dimethyladenosine, 7-methyladenine, 2-methylthio-adenine, and 2-methoxy-adenine, inosine, 1-methyl-inosine, wyosine, wybutosine, 7-deaza-guanosine, 7-deaza-8-aza-guanosine, 6-thio-guanosine, 6-thio-7-deaza-guanosine, 6-thio-7-deaza-8-aza-guanosine, 7-methyl-guanosine, 6-thio-7-methyl-guanosine, 7-methylinosine, 6-methoxy-guanosine, 1-methylguanosine, N2-methylguanosine, N2,N2-dimethylguanosine, 8-oxo-guanosine, 7-methyl-8-oxo-guanosine, 1-methyl-6-thio-guanosine, N2-methyl-6-thio-guanosine, and N2,N2-dimethyl-6-thio-guanosine, 5′-O-(1-thiophosphate)-adenosine, 5′-O-(1-thiophosphate)-cytidine, 5′-O-(1-thiophosphate)-guanosine, 5′-O-(1-thiophosphate)-uridine, 5′-O-(1-thiophosphate)-pseudouridine, 6-aza-cytidine, 2-thio-cytidine, alpha-thio-cytidine, Pseudo-iso-cytidine, 5-aminoallyl-uridine, 5-iodo-uridine, N1-methyl-pseudouridine, 5,6-dihydrouridine, alpha-thio-uridine, 4-thio-uridine, 6-aza-uridine, 5-hydroxy-uridine, deoxy-thymidine, 5-methyl-uridine, Pyrrolo-cytidine, inosine, alpha-thio-guanosine, 6-methyl-guanosine, 5-methyl-cytidine, 8-oxo-guanosine, 7-deaza-guanosine, N1-methyl-adenosine, 2-amino-6-Chloro-purine, N6-methyl-2-amino-purine, Pseudo-iso-cytidine, 6-Chloro-purine, N6-methyl-adenosine, alpha-thio-adenosine, 8-azido-adenosine, 7-deaza-adenosine.

[0222] In some embodiments, the at least one modified nucleotide is selected from pseudouridine, N1-methylpseudouridine, N1-ethylpseudouridine, 2-thiouridine, 4′-thiouridine, 5-methylcytosine, 5-methyluridine, 2-thio-1-methyl-1-deaza-pseudouridine, 2-thio-1-methyl-pseudouridine, 2-thio-5-aza-uridine, 2-thio-dihydropseudouridine, 2-thio-dihydrouridine, 2-thio-pseudouridine, 4-methoxy-2-thio-pseudouridine, 4-methoxy-pseudouridine, 4-thio-1-methyl-pseudouridine, 4-thio-pseudouridine, 5-aza-uridine, dihydropseudouridine, 5-methoxyuridine and 2′-O-methyl uridine.

[0223] In some embodiments, 100% of the uracil in the coding sequence have a chemical modification, preferably a chemical modification is in the 5-position of the uracil.

[0224] Particularly preferred in the context of the invention are pseudouridine (ψ), N1-methylpseudouridine (m1ψ), 5-methylcytosine, and 5-methoxyuridine.

[0225] Incorporating modified nucleotides such as pseudouridine (ψ), N1-methylpseudouridine (m1ψ), 5-methylcytosine, and/or 5-methoxyuridine into the coding sequence of the RNA of the first aspect may be advantageous as unwanted innate immune responses (upon administration of the coding RNA or the Rotavirus vaccine) may be adjusted or reduced.

[0226] In embodiments, the coding RNA comprises at least one coding sequence encoding a Rotavoirus antigenic protein as defined herein, preferably VP8* as defined herein, wherein said coding sequence comprises at least one modified nucleotide selected from pseudouridine (ψ) and N1-methylpseudouridine (m1ψ).

[0227] In preferred embodiments, the coding RNA comprises at least one coding sequence, wherein said coding sequence comprises at least one pseudouridine (ψ) nucleotide.

[0228] In a embodiments, the coding RNA comprises at least one coding sequence encoding a Rotavoirus antigenic protein as defined herein, preferably VP8*, wherein said coding sequence comprises at least one modified nucleotide selected from pseudouridine (ψ) and/or N1-methylpseudouridine (m1ψ), wherein all uracil nucleotides are replaced by pseudouridine (ψ) nucleotides and/or N1-methylpseudouridine (m1ψ) nucleotides.

[0229] In preferred embodiments, the coding RNA comprises at least one coding sequence, wherein said coding sequence comprises pseudouridine (ψ) nucleotides, wherein all uracil nucleotides are replaced by pseudouridine (ψ) nucleotides.

[0230] In preferred embodiments, the coding RNA comprises at least one codon modified coding sequence.

[0231] In preferred embodiments, the at least one coding sequence (of the coding RNA) is a codon modified coding sequence, wherein the amino acid sequence encoded by the at least one codon modified coding sequence is preferably not being modified compared to the amino acid sequence encoded by the corresponding wild type coding sequence.

[0232] The term “codon modified coding sequence” relates to coding sequences that differ in at least one codon (triplets of nucleotides coding for one amino acid) compared to the corresponding wild type coding sequence. Suitably, a codon modified coding sequence in the context of the invention may show improved resistance to in vivo degradation and/or improved stability in vivo, and/or improved translatability in vivo. Codon modifications in the broadest sense make use of the degeneracy of the genetic code wherein multiple codons may encode the same amino acid and may be used interchangeably (cf. Table 2) to optimize/modify the coding sequence for in vivo applications as outlined above.

[0233] In particularly preferred embodiments, the at least one coding sequence of the coding RNA is a codon modified coding sequence, wherein the codon modified coding sequence is selected from C maximized coding sequence, CAI maximized coding sequence, human codon usage adapted coding sequence, G/C content modified coding sequence, and G/C optimized coding sequence, or any combination thereof, or any combination thereof.

[0234] In embodiments, the coding RNA may be modified, wherein the C content of the at least one coding sequence may be increased, preferably maximized, compared to the C content of the corresponding wild type coding sequence (herein referred to as “C maximized coding sequence”). The amino acid sequence encoded by the C maximized coding sequence of the RNA is preferably not modified compared to the amino acid sequence encoded by the respective wild type coding sequence. The generation of a C maximized nucleic acid sequences may suitably be carried out using a modification method according to WO2015/062738. In this context, the disclosure of WO2015/062738 is included herewith by reference.

[0235] In embodiments, the coding RNA may be modified, wherein the G/C content of the at least one coding sequence may be modified compared to the G/C content of the corresponding wild type coding sequence (herein referred to as “G/C content modified coding sequence”). In this context, the terms “G/C optimization” or “G/C content modification” relate to an RNA that comprises a modified, preferably an increased number of guanosine and/or cytosine nucleotides as compared to the corresponding wild type coding sequence. Such an increased number may be generated by substitution of codons containing adenosine or thymidine nucleotides by codons containing guanosine or cytosine nucleotides. Advantageously, RNA sequences having an increased G/C content are more stable or show a better expression than sequences having an increased A/U. The amino acid sequence encoded by the G/C content modified coding sequence of the RNA is preferably not modified as compared to the amino acid sequence encoded by the respective wild type sequence. Preferably, the G/C content of the coding sequence of the RNA is increased by at least 10%, 20%, 30%, preferably by at least 40% compared to the G/C content of the coding sequence of the corresponding wild type RNA sequence.

[0236] In preferred embodiments, the coding RNA may be modified, wherein the G/C content of the at least one coding sequence may be optimized compared to the G/C content of the corresponding wild type coding sequence (herein referred to as “G/C content optimized coding sequence”). “Optimized” in that context refers to a coding sequence wherein the G/C content is preferably increased to the essentially highest possible G/C content. The amino acid sequence encoded by the G/C content optimized coding sequence of the RNA is preferably not modified as compared to the amino acid sequence encoded by the respective wild type coding sequence. The generation of a G/C content optimized RNA sequence may be carried out using a method according to WO2002/098443. In this context, the disclosure of WO2002/098443 is included in its full scope in the present invention. Throughout the description, including the <223> identifier of the sequence listing, G/C optimized coding sequences are indicated by the abbreviations “opt1” or “opt5”.

[0237] In embodiments, the coding RNA may be modified, wherein the codons in the at least one coding sequence may be adapted to human codon usage (herein referred to as “human codon usage adapted coding sequence”). Codons encoding the same amino acid occur at different frequencies in humans. Accordingly, the coding sequence of the RNA is preferably modified such that the frequency of the codons encoding the same amino acid corresponds to the naturally occurring frequency of that codon according to the human codon usage. For example, in the case of the amino acid Ala, the wild type coding sequence is preferably adapted in a way that the codon “GCC” is used with a frequency of 0.40, the codon “GCT” is used with a frequency of 0.28, the codon “GCA” is used with a frequency of 0.22 and the codon “GCG” is used with a frequency of 0.10 etc. (see Table 2). Accordingly, such a procedure (as exemplified for Ala) is applied for each amino acid encoded by the coding sequence of the RNA to obtain sequences adapted to human codon usage. Throughout the description, including the <223> identifier of the sequence listing, human codon usage adapted coding sequences are indicated by the abbreviation “opt3”.

TABLE 2
Human codon usage table with frequencies
indicated for each amino acid

| Amino | | | Amino | | |
|---|---|---|---|---|---|
| acid | codon | frequency | acid | codon | frequency |
| Ala | GCG | 0.10 | Pro | CCG | 0.11 |
| Ala | GCA | 0.22 | Pro | CCA | 0.27 |
| Ala | GCT | 0.28 | Pro | CCT | 0.29 |
| Ala | GCC* | 0.40 | Pro | CCC* | 0.33 |
| Cys | TGT | 0.42 | Gln | CAG* | 0.73 |
| Cys | TGC* | 0.58 | Gln | CAA | 0.27 |
| Asp | GAT | 0.44 | Arg | AGG | 0.22 |
| Asp | GAC* | 0.56 | Arg | AGA* | 0.21 |
| Glu | GAG* | 0.59 | Arg | CGG | 0.19 |
| Glu | GAA | 0.41 | Arg | CGA | 0.10 |
| Phe | TTT | 0.43 | Arg | CGT | 0.09 |
| Phe | TTC* | 0.57 | Arg | CGC | 0.19 |
| Gly | GGG | 0.23 | Ser | AGT | 0.14 |
| Gly | GGA | 0.26 | Ser | AGC* | 0.25 |
| Gly | GGT | 0.18 | Ser | TCG | 0.06 |
| Gly | GGC* | 0.33 | Ser | TCA | 0.15 |
| His | CAT | 0.41 | Ser | TCT | 0.18 |
| His | CAC* | 0.59 | Ser | TCC | 0.23 |
| Ile | ATA | 0.14 | Thr | ACG | 0.12 |
| Ile | ATT | 0.35 | Thr | ACA | 0.27 |
| Ile | ATC* | 0.52 | Thr | ACT | 0.23 |
| Lys | AAG* | 0.60 | Thr | ACC* | 0.38 |
| Lys | AAA | 0.40 | Val | GTG* | 0.48 |
| Leu | TTG | 0.12 | Val | GTA | 0.10 |
| Leu | TTA | 0.06 | Val | GTT | 0.17 |
| Leu | CTG* | 0.43 | Val | GTC | 0.25 |
| Leu | CTA | 0.07 | Trp | TGG* | 1 |
| Leu | CTT | 0.12 | Tyr | TAT | 0.42 |
| Leu | CTC | 0.20 | Tyr | TAC* | 0.58 |
| Met | ATG* | 1 | Stop | TGA* | 0.61 |
| Asn | AAT | 0.44 | Stop | TAG | 0.17 |
| Asn | AAC* | 0.56 | Stop | TAA | 0.22 |

*most frequent human codon

[0238] In preferred embodiments, the coding RNA may be modified, wherein the codon adaptation index (CAI) may be increased or preferably maximised in the at least one coding sequence (herein referred to as “CAI maximized coding sequence”). It is preferred that all codons of the wild type nucleic acid sequence that are relatively rare in e.g. a human are exchanged for a respective codon that is frequent in the e.g. a human, wherein the frequent codon encodes the same amino acid as the relatively rare codon. Suitably, the most frequent codons are used for each amino acid of the encoded protein (see Table 2, most frequent human codons are marked with asterisks). Suitably, the coding RNA comprises at least one coding sequence, wherein the codon adaptation index (CAI) of the at least one coding sequence is at least 0.5, at least 0.8, at least 0.9 or at least 0.95. Most preferably, the codon adaptation index (CAI) of the at least one coding sequence is 1 (CAI=1). For example, in the case of the amino acid Ala, the wild type coding sequence may be adapted in a way that the most frequent human codon “GCC” is always used for said amino acid. Accordingly, such a procedure (as exemplified for Ala) may be applied for each amino acid encoded by the coding sequence of the RNA to obtain CAI maximized coding sequences. Throughout the description, including the <223> identifier of the sequence listing, CAI maximized coding sequences are indicated by the abbreviation “opt4”.

[0239] Suitable VP8* proteins/constructs as defined herein and their particular coding sequences are disclosed in Table 3. Therein, each row corresponds to suitable VP8* constructs (compare with Table 1, columns A and B).

[0240] Column A of Table 3 provides a short description of suitable antigen constructs (see Table X1 for the description of heterologous fragments). Column B of Table 3 provides a description of the Rotavirus of which the respective VP8* is derived from. Column C of Table 3 provides protein SEQ ID NOs of respective VP8* antigen constructs. Column D of Table 3 provides SEQ ID NO of the corresponding wild type RNA coding sequences. Column E of Table 3 provides SEQ ID NO of the corresponding G/C optimized RNA coding sequences (opt1). Column F of Table 3 provides SEQ ID NO of the corresponding G/C optimized RNA coding sequences (opt5). Column G of Table 3 provides SEQ ID NO of the corresponding CAI maximized coding sequence (opt4).

[0241] Notably, the description of the invention explicitly includes the information provided under <223> identifier of the ST25 sequence listing of the present application. Preferred mRNA sequences comprising the coding sequences of Table 3 are provided in Table 4.

TABLE 3
Preferred coding sequences encoding Rotavirus VP8* antigen constructs:

| A | B | C | D | E | F | G |
|---|---|---|---|---|---|---|
| VP4 | RVA/BE1058/P[4] | 10 | 118 | 154, 262 | 370 | 478 |
| VP4 | RVA/DS-1/P[4] | 11 | 119 | 155, 263 | 371 | 479 |
| VP4 | RVA/DS-1/P[4] | 12 | 120 | 156, 264 | 372 | 480 |
| VP4 | RVA/F01322/P[6] | 13 | 121 | 157, 265 | 373 | 481 |
| VP4 | RVA/1076/P[6] | 14 | 122 | 158, 266 | 374 | 482 |
| VP4 | RVA/BE1128/P[8] | 15 | 123 | 159, 267 | 375 | 483 |
| VP4 | RVA/Wa-VirWa/P[8] | 16 | 124 | 160, 268 | 376 | 484 |
| VP4 | RVA/Wa/P[8] | 17 | 125 | 161, 269 | 377 | 485 |
| VP4 | RVA/Wa/P[8] | 18 | 126 | 162, 270 | 378 | 486 |
| VP8* | RVA/BE1058/P[4] | 9, 19 | 127 | 163, 271 | 379 | 487 |
| VP8* | RVA/DS-1/P[4] | 20 | 128 | 164, 272 | 380 | 488 |
| VP8* | RVA/DS-1/P[4] | 21 | 129 | 165, 273 | 381 | 489 |
| VP8* | RVA/F01322/P[6] | 8, 22 | 130 | 166, 274 | 382 | 490 |
| VP8* | RVA/1076/P[6] | 23 | 131 | 167, 275 | 383 | 491 |
| VP8* | RVA/BE1128/P[8] | 7, 24 | 132 | 168, 276 | 384 | 492 |
| VP8* | RVA/Wa-VirWa/P[8] | 25 | 133 | 169, 277 | 385 | 493 |
| VP8* | RVA/Wa/P[8] | 26 | 134 | 170, 278 | 386 | 494 |
| VP8* | RVA/Wa/P[8] | 27 | 135 | 171, 279 | 387 | 495 |
| VP8*(65-223) | RVA/BE1058/P[4] | 28 | 136 | 172, 280 | 388 | 496 |
| VP8*(65-223) | RVA/DS-1/P[4] | 29 | 137 | 173, 281 | 389 | 497 |
| VP8*(65-223) | RVA/DS-1/P[4] | 30 | 138 | 174, 282 | 390 | 498 |
| VP8*(65-223) | RVA/F01322/P[6] | 31 | 139 | 175, 283 | 391 | 499 |
| VP8*(65-223) | RVA/1076/P[6] | 32 | 140 | 176, 284 | 392 | 500 |
| VP8*(65-223) | RVA/BE1128/P[8] | 33 | 141 | 177, 285 | 393 | 501 |
| VP8*(65-223) | RVA/Wa-VirWa/P[8] | 34 | 142 | 178, 286 | 394 | 502 |
| VP8*(65-223) | RVA/Wa/P[8] | 35 | 143 | 179, 287 | 395 | 503 |
| VP8*(65-223) | RVA/Wa/P[8] | 36 | 144 | 180, 288 | 396 | 504 |
| VP8*(41-223) | RVA/BE1058/P[4] | 37 | 145 | 181, 289 | 397 | 505 |
| VP8*(41-223) | RVA/DS-1/P[4] | 38 | 146 | 182, 290 | 398 | 506 |
| VP8*(41-223) | RVA/DS-1/P[4] | 39 | 147 | 183, 291 | 399 | 507 |
| VP8*(41-223) | RVA/F01322/P[6] | 40 | 148 | 184, 292 | 400 | 508 |
| VP8*(41-223) | RVA/1076/P[6] | 41 | 149 | 185, 293 | 401 | 509 |
| VP8*(41-223) | RVA/BE1128/P[8] | 42 | 150 | 186, 294 | 402 | 510 |
| VP8*(41-223) | RVA/Wa-VirWa/P[8] | 43 | 151 | 187, 295 | 403 | 511 |
| VP8*(41-223) | RVA/Wa/P[8] | 44 | 152 | 188, 296 | 404 | 512 |
| VP8*(41-223) | RVA/Wa/P[8] | 45 | 153 | 189, 297 | 405 | 513 |
| P2_VP8*(65-223) | RVA/BE1058/P[4] | 6, 46 | | 190, 298, 1903 | 406 | 514 |
| P2_VP8*(65-223) | RVA/DS-1/P[4] | 47 | | 191, 299 | 407 | 515 |
| P2_VP8*(65-223) | RVA/DS-1/P[4] | 48 | | 192, 300 | 408 | 516 |
| P2_VP8*(65-223) | RVA/F01322/P[6] | 5, 49 | | 193, 301, 1904 | 409 | 517 |
| P2_VP8*(65-223) | RVA/1076/P[6] | 50 | | 194, 302 | 410 | 518 |
| P2_VP8*(65-223) | RVA/BE1128/P[8] | 4, 51 | | 195, 303 | 411 | 519 |
| P2_VP8*(65-223) | RVA/Wa-VirWa/P[8] | 52 | | 196, 304 | 412 | 520 |
| P2_VP8*(65-223) | RVA/Wa/P[8] | 53 | | 197, 305 | 413 | 521 |
| P2_VP8*(65-223) | RVA/Wa/P[8] | 54 | | 198, 306 | 414 | 522 |
| P2_VP8*(41-223) | RVA/BE1058/P[4] | 55 | | 199, 307 | 415 | 523 |
| P2_VP8*(41-223) | RVA/DS-1/P[4] | 56 | | 200, 308 | 416 | 524 |
| P2_VP8*(41-223) | RVA/DS-1/P[4] | 57 | | 201, 309 | 417 | 525 |
| P2_VP8*(41-223) | RVA/F01322/P[6] | 58 | | 202, 310 | 418 | 526 |
| P2_VP8*(41-223) | RVA/1076/P[6] | 59 | | 203, 311 | 419 | 527 |
| P2_VP8*(41-223) | RVA/BE1128/P[8] | 60 | | 204, 312 | 420 | 528 |
| P2_VP8*(41-223) | RVA/Wa-VirWa/P[8] | 61 | | 205, 313 | 421 | 529 |
| P2_VP8*(41-223) | RVA/Wa/P[8] | 62 | | 206, 314 | 422 | 530 |
| P2_VP8*(41-223) | RVA/Wa/P[8] | 63 | | 207, 315 | 423 | 531 |
| P2_VP8*(65-223)_Ferritin | RVA/BE1058/P[4] | 64 | | 208, 316 | 424 | 532 |
| P2_VP8*(65-223)_Ferritin | RVA/DS-1/P[4] | 65 | | 209, 317 | 425 | 533 |
| P2_VP8*(65-223)_Ferritin | RVA/DS-1/P[4] | 66 | | 210, 318 | 426 | 534 |
| P2_VP8*(65-223)_Ferritin | RVA/F01322/P[6] | 67 | | 211, 319 | 427 | 535 |
| P2_VP8*(65-223)_Ferritin | RVA/1076/P[6] | 68 | | 212, 320 | 428 | 536 |
| P2_VP8*(65-223)_Ferritin | RVA/BE1128/P[8] | 69 | | 213, 321 | 429 | 537 |
| P2_VP8*(65-223)_Ferritin | RVA/Wa-VirWa/P[8] | 70 | | 214, 322 | 430 | 538 |
| P2_VP8*(65-223)_Ferritin | RVAA/Wa/P[8] | 71 | | 215, 323 | 431 | 539 |
| P2_VP8*(65-223)_Ferritin | RVA/Wa/P[8] | 72 | | 216, 324 | 432 | 540 |
| P2_VP8*(41-223)_Ferritin | RVA/BE1058/P[4] | 73 | | 217, 325 | 433 | 541 |
| P2_VP8*(41-223)_Ferritin | RVA/DS-1/P[4] | 74 | | 218, 326 | 434 | 542 |
| P2_VP8*(41-223)_Ferritin | RVA/DS-1/P[4] | 75 | | 219, 327 | 435 | 543 |
| P2_VP8*(41-223)_Ferritin | RVA/F01322/P[6] | 76 | | 220, 328 | 436 | 544 |
| P2_VP8*(41-223)_Ferritin | RVA/1076/P[6] | 77 | | 221, 329 | 437 | 545 |
| P2_VP8*(41-223)_Ferritin | RVA/BE1128/P[8] | 78 | | 222, 330 | 438 | 546 |
| P2_VP8*(41-223)_Ferritin | RVA/Wa-VirWa/P[8] | 79 | | 223, 331 | 439 | 547 |
| P2_VP8*(41-223)_Ferritin | RVA/Wa/P[8] | 80 | | 224, 332 | 440 | 548 |
| P2_VP8*(41-223)_Ferritin | RVA/Wa/P[8] | 81 | | 225, 333 | 441 | 549 |
| LumSynt_P2_VP8*(65-223) | RVA/BE1058/P[4] | 82 | | 226, 334 | 442 | 550 |
| LumSynt_P2_VP8*(65-223) | RVA/DS-1/P[4] | 83 | | 227, 335 | 443 | 551 |
| LumSynt_P2_VP8*(65-223) | RVA/DS-1/P[4] | 84 | | 228, 336 | 444 | 552 |
| LumSynt_P2_VP8*(65-223) | RVA/F01322/P[6] | 85 | | 229, 337 | 445 | 553 |
| LumSynt_P2_VP8*(65-223) | RVA/1076/P[6] | 86 | | 230, 338 | 446 | 554 |
| LumSynt_P2_VP8*(65-223) | RVA/BE1128/P[8] | 87 | | 231, 339 | 447 | 555 |
| LumSynt_P2_VP8*(65-223) | RVA/Wa-VirWa/P[8] | 88 | | 232, 340 | 448 | 556 |
| LumSynt_P2_VP8*(65-223) | RVA/Wa/P[8] | 89 | | 233, 341 | 449 | 557 |
| LumSynt_P2_VP8*(65-223) | RVA/Wa/P[8] | 90 | | 234, 342 | 450 | 558 |
| LumSynt_P2_VP8*(41-223) | RVA/BE1058/P[4] | 3, 91 | | 235, 343, 1905 | 451 | 559 |
| LumSynt_P2_VP8*(41-223) | RVA/DS-1/P[4] | 92 | | 236, 344 | 452 | 560 |
| LumSynt_P2_VP8*(41-223) | RVA/DS-1/P[4] | 93 | | 237, 345 | 453 | 561 |
| LumSynt_P2_VP8*(41-223) | RVA/F01322/P[6l | 2, 94 | | 238, 346, 1906 | 454 | 562 |
| LumSynt_P2_VP8*(41-223) | RVA/1076/P[6] | 95 | | 239, 347 | 455 | 563 |
| LumSynt_P2_VP8*(41-223) | RVA/BE1128/P[8] | 1, 96 | | 240, 348 | 456 | 564 |
| LumSynt_P2_VP8*(41-223) | RVA/Wa-VirWa/P[8] | 97 | | 241, 349 | 457 | 565 |
| LumSynt_P2_VP8*(41-223) | RVA/Wa/P[8] | 98 | | 242, 350 | 458 | 566 |
| LumSynt_P2_VP8*(41-223) | RVA/Wa/P{8] | 99 | | 243, 351 | 459 | 567 |
| SP-IgE_P2_VP8*(65-223) | RVA/BE1058/P[4] | 100 | | 244, 352 | 460 | 568 |
| SP-IgE_P2_VP8*(65-223) | RVA/DS-1/P[4] | 101 | | 245, 353 | 461 | 569 |
| SP-IgE_P2_VP8*(65-223) | RVA/DS-1/P[41 | 102 | | 246, 354 | 462 | 570 |
| SP-IgE_P2_VP8*(65-223) | RVA/F01322/P[6] | 103 | | 247, 355 | 463 | 571 |
| SP-IgE_P2_VP8*(65-223) | RVA/1076/P[6] | 104 | | 248, 356 | 464 | 572 |
| SP-IgE_P2_VP8*(65-223) | RVA/BE1128/P[8] | 105 | | 249, 357 | 465 | 573 |
| SP-IgE_P2_VP8*(65-223) | RVA/Wa-VirWa/P[8] | 106 | | 250, 358 | 466 | 574 |
| SP-IgE_P2_VP8*(65-223) | RVA/Wa/P[8] | 107 | | 251, 359 | 467 | 575 |
| SP-IgE_P2_VP8*(65-223) | RVA/Wa/P[8] | 108 | | 252, 360 | 468 | 576 |
| SP-IgE_P2_VP8*(41-223) | RVA/BE1058/P[4] | 109 | | 253, 361 | 469 | 577 |
| SP-IgE_P2_VP8*(41-223) | RVA/DS-1/P[4] | 110 | | 254, 362 | 470 | 578 |
| SP-IgE_P2_VP8*(41-223) | RVA/DS-1/P[4] | 111 | | 255, 363 | 471 | 579 |
| SP-IgE_P2_VP8*(41-223) | RVA/F01322/P[6] | 112 | | 256, 364 | 472 | 580 |
| SP-IgE_P2_VP8*(41-223) | RVA/1076/P[6] | 113 | | 257, 365 | 473 | 581 |
| SP-IgE_P2_VP8*(41-223) | RVA/BE1128/P[8] | 114 | | 258, 366 | 474 | 582 |
| SP-IgE_P2_VP8*(41-223) | RVA/Wa-VirWa/P[8] | 115 | | 259, 367 | 475 | 583 |
| SP-IgE_P2_VP8*(41-223) | RVA/Wa/P[8] | 116 | | 260, 368 | 476 | 584 |
| SP-IgE_P2_VP8*(41-223) | RVA/Wa/P[8] | 117 | | 261, 369 | 477 | 585 |
| P2_VP8*(64-223) | RVA/BE1058/P[4] | 1899 | | 1901 | | |
| P2_VP8*(64-223) | RVA/F01322/P[6] | 1900 | | 1902 | | |

[0242] In preferred embodiments, the coding RNA of the first aspect comprises at least one coding sequence comprising or consisting a codon modified nucleic acid sequence which is identical or at least 70%, 80%, 85%, 86%, 87%, 88%, 89%, 90%, 91%, 92%, 93%, 94%, 95%, 96%, 97%, 98%, or 99% identical to a codon modified nucleic acid sequence selected from the group consisting of SEQ ID NOs: 154-585, 1901-1906 or a fragment or variant of any of these sequences. Additional information regarding each of these suitable nucleic acid sequences encoding may also be derived from the sequence listing, in particular from the details provided therein under identifier <223>.

[0243] In particularly preferred embodiments, the coding RNA of the first aspect comprises at least one coding sequence comprising or consisting a codon modified nucleic acid sequence which is identical or at least 70%, 80%, 85%, 86%, 87%, 88%, 89%, 90%, 91%, 92%, 93%, 94%, 95%, 96%, 97%, 98%, or 99% identical to a codon modified nucleic acid sequence selected from the group consisting of SEQ ID NOs: 154-369, 1901-1906 or a fragment or variant of any of these sequences. Additional information regarding each of these suitable nucleic acid sequences encoding may also be derived from the sequence listing, in particular from the details provided therein under identifier <223>.

[0244] RNA Elements, mRNA Elements:

[0245] In embodiments, the coding RNA of the first aspect may be monocistronic, bicistronic, or multicistronic.

[0246] The term “monocistronic” will be recognized and understood by the person of ordinary skill in the art, and is e.g. intended to refer to an RNA that comprises only one coding sequences. The terms “bicistronic”, or “multicistronic” as used herein will be recognized and understood by the person of ordinary skill in the art, and are e.g. intended to refer to an RNA that may comprise two (bicistronic) or more (multicistronic) coding sequences.

[0247] In preferred embodiments, the coding RNA of the first aspect is monocistronic.

[0248] In embodiments, the coding RNA is monocistronic and the coding sequence of said RNA encodes at least two different antigenic peptides or proteins derived from a Rotavirus (e.g. VP8*). Accordingly, said coding sequence may encode at least two, three, four, five, six, seven, eight and more antigenic peptides or proteins derived from a Rotavirus (e.g. VP8*), linked with or without an amino acid linker sequence, wherein said linker sequence can comprise rigid linkers, flexible linkers, cleavable linkers, or a combination thereof. Such constructs are herein referred to as “multi-antigen-constructs”.

[0249] In embodiments, the coding RNA may be bicistronic or multicistronic and comprises at least two coding sequences, wherein the at least two coding sequences encode two or more different antigenic peptides or proteins derived from Rotavirus (e.g. VP8*). Accordingly, the coding sequences in a bicistronic or multicistronic RNA suitably encodes distinct antigenic proteins or peptides as defined herein or immunogenic fragments or immunogenic variants thereof. Preferably, the coding sequences in said bicistronic or multicistronic constructs may be separated by at least one IRES (internal ribosomal entry site) sequence. Thus, the term “encoding two or more antigenic peptides or proteins” may mean, without being limited thereto, that the bicistronic or multicistronic RNA encodes e.g. at least two, three, four, five, six or more (preferably different) antigenic peptides or proteins of different Rotaviruses. Alternatively, the bicistronic or multicistronic RNA may encode e.g. at least two, three, four, five, six or more (preferably different) antigenic peptides or proteins derived from the same Rotavirus. In that context, suitable IRES sequences may be selected from the list of nucleic acid sequences according to SEQ ID NOs: 1566-1662 of the patent application WO2017/081082, or fragments or variants of these sequences. In this context, the disclosure of WO2017/081082 relating to IRES sequences is herewith incorporated by reference.

[0250] It has to be understood that, in the context of the invention, certain combinations of coding sequences may be generated by any combination of monocistronic, bicistronic and multicistronic RNA constructs and/or multi-antigen-constructs to obtain a composition encoding multiple antigenic peptides or proteins as defined herein.

[0251] Preferably, the coding RNA of the first aspect typically comprises about 50 to about 20000 nucleotides, or about 500 to about 10000 nucleotides, or about 1000 to about 10000 nucleotides, or preferably about 1000 to about 5000 nucleotides, or even more preferably about 1000 to about 2500 nucleotides.

[0252] According to preferred embodiments, the coding RNA of the first aspect is an mRNA, a self-replicating RNA, a circular RNA, a viral RNA, or a replicon RNA.

[0253] In embodiments, the coding RNA of the first aspect is a circular RNA. As used herein, “circular RNA” or “circRNAs” have to be understood as a circular polynucleotide constructs that encode at least one antigenic peptide or protein as defined herein. Accordingly, in preferred embodiments, said circRNA comprises at least one coding sequence encoding at least one antigenic protein from a Rotavirus (e.g., VP8*), or an immunogenic fragment or an immunogenic variant thereof.

[0254] In embodiments, the coding RNA is a replicon RNA. The term “replicon RNA” will be recognized and understood by the person of ordinary skill in the art, and is e.g. intended to be an optimized self-replicating RNA. Such constructs may include replicase elements derived from e.g. alphaviruses (e.g. SFV, SIN, VEE, or RRV) and the substitution of the structural virus proteins with the nucleic acid of interest (that is, the coding sequence encoding a Rotavirus protein (e.g., VP8*)). Alternatively, the replicase may be provided on an independent coding RNA construct. Downstream of the replicase may be a sub-genomic promoter that controls replication of the replicon RNA.

[0255] In preferred embodiments, the coding RNA of the first aspect is an mRNA.

[0256] The terms “RNA” and “mRNA” will be recognized and understood by the person of ordinary skill in the art, and are e.g. intended to be a ribonucleic acid molecule, i.e. a polymer consisting of nucleotides. These nucleotides are usually adenosine-monophosphate, uridine-monophosphate, guanosine-monophosphate and cytidine-monophosphate monomers which are connected to each other along a so-called backbone. The backbone is formed by phosphodiester bonds between the sugar, i.e. ribose, of a first and a phosphate moiety of a second, adjacent monomer. The specific succession of the monomers is called the RNA-sequence. The mRNA (messenger RNA) provides the nucleotide sequence that may be translated into an amino-acid sequence of a particular peptide or protein.

[0257] In the context of the invention, the coding RNA, preferably the mRNA, may provide at least one coding sequence encoding an antigenic protein from a Rotavirus (e.g. VP8*) that is translated into a functional antigen after administration (e.g. after administration to a subject, e.g. a human subject).

[0258] Accordingly, the coding RNA, preferably the mRNA, is suitable for a vaccine, preferably a Rotavirus vaccine.

[0259] Suitably, the RNA may be modified by the addition of a 5′-cap structure, which preferably stabilizes the coding RNA and/or enhances expression of the encoded antigen and/or reduces the stimulation of the innate immune system (after administration to a subject). A 5′-cap structure is of particular importance in embodiments where the coding RNA is a linear, e.g. a linear mRNA or a linear coding replicon RNA.

[0260] Accordingly, in preferred embodiments, the coding RNA, in particular the mRNA of the first aspect comprises a 5′-cap structure, preferably cap0, cap1, cap2, a modified cap0, or a modified cap1 structure.

[0261] The term “5′-cap structure” as used herein will be recognized and understood by the person of ordinary skill in the art, and is e.g. intended to refer to a 5′ modified nucleotide, particularly a guanine nucleotide, positioned at the 5′-end of an RNA molecule, e.g. an mRNA molecule. Preferably, the 5′-cap structure is connected via a 5′-5′-triphosphate linkage to the RNA.

[0262] 5′-cap structures which may be suitable in the context of the present invention are cap0 (methylation of the first nucleobase, e.g. m7GpppN), cap1 (additional methylation of the ribose of the adjacent nucleotide of m7GpppN), cap2 (additional methylation of the ribose of the 2nd nucleotide downstream of the m7GpppN), cap3 (additional methylation of the ribose of the 3rd nucleotide downstream of the m7GpppN), cap4 (additional methylation of the ribose of the 4th nucleotide downstream of the m7GpppN), ARCA (anti-reverse cap analogue), modified ARCA (e.g. phosphothioate modified ARCA), inosine, N1-methyl-guanosine, 2′-fluoro-guanosine, 7-deaza-guanosine, 8-oxo-guanosine, 2-amino-guanosine, LNA-guanosine, and 2-azido-guanosine.

[0263] A 5′-cap (cap0 or cap1) structure may be formed in chemical RNA synthesis or in RNA in vitro transcription (co-transcriptional capping) using cap analogues.

[0264] The term “cap analogue” as used herein will be recognized and understood by the person of ordinary skill in the art, and is e.g. intended to refer to a non-polymerizable di-nucleotide or tri-nucleotide that has cap functionality in that it facilitates translation or localization, and/or prevents degradation of a nucleic acid molecule, particularly of an RNA molecule, when incorporated at the 5′-end of the nucleic acid molecule. Non-polymerizable means that the cap analogue will be incorporated only at the 5′-terminus because it does not have a 5′ triphosphate and therefore cannot be extended in the 3′-direction by a template-dependent polymerase, particularly, by template-dependent RNA polymerase. Examples of cap analogues include, but are not limited to, a chemical structure selected from the group consisting of m7GpppG, m7GpppA, m7GpppC; unmethylated cap analogues (e.g. GpppG); dimethylated cap analogue (e.g. m2,7GpppG), trimethylated cap analogue (e.g. m2,2,7GpppG), dimethylated symmetrical cap analogues (e.g. m7Gpppm7G), or anti reverse cap analogues (e.g. ARCA; m7,2′OmeGpppG, m7,2′dGpppG, m7,3′OmeGpppG, m7,3′dGpppG and their tetraphosphate derivatives). Further cap analogues have been described previously (WO2008/016473, WO2008/157688, WO2009/149253, WO2011/015347, and WO2013/059475). Further suitable cap analogues in that context are described in WO2017/066793, WO2017/066781, WO2017/066791, WO2017/066789, WO2017/053297, WO2017/066782, WO2018/075827 and WO2017/066797 wherein the disclosures referring to cap analogues are incorporated herewith by reference.

[0265] In embodiments, a modified cap1 structure is generated using tri-nucleotide cap analogue as disclosed in WO2017/053297, WO2017/066793, WO2017/066781, WO2017/066791, WO2017/066789, WO2017/066782, WO2018/075827 and WO2017/066797. In particular, any cap structures derivable from the structure disclosed in claim 1-5 of WO2017/053297 may be suitably used to co-transcriptionally generate a modified cap1 structure. Further, any cap structures derivable from the structure defined in claim 1 or claim 21 of WO2018/075827 may be suitably used to co-transcriptionally generate a modified cap1 structure.

[0266] In particularly preferred embodiments, the coding RNA, in particular the mRNA of the first aspect comprises a cap1 structure. As shown in the Example section, the presence of a cap1 structure is of particular importance as the induction of a specific immune response against Rotavirus VP8* could be increased (see Examples 4, 5, and 6).

[0267] In preferred embodiments, the 5′-cap structure may suitably be added co-transcriptionally using tri-nucleotide cap analogue as defined herein in an RNA in vitro transcription reaction as defined herein. Accordingly, as supported by the example section, it is surprisingly advantageous that the coding RNA comprises a cap1 structure, wherein said cap1 structure is obtainable by co-transcriptional capping. As shown in the Example section, the presence of a Cap1 structure obtainable by co-transcriptional capping is advantageous for the induction of a specific immune response against Rotavirus VP8* (see Example 6).

[0268] In preferred embodiments, the cap1 structure of the coding RNA of the invention is formed using co-transcriptional capping using tri-nucleotide cap analogues m7G(5′)ppp(5′)(2′OMeA)pG or m7G(5′)ppp(5′)(2′OMeG)pG. A preferred cap1 analogus in that context is m7G(5′)ppp(5′)(2′OMeA)pG.

[0269] An exemplary protocol of a co-transcriptional capping procedure is provided in the Examples section (see Example 1). As shown in the Example section, using a coding RNA comprising a cap1 structure obtainable by co-transcriptional capping induced stronger immune responses than a coding RNA comprising a cap1 structure obtainable by enzymatic capping. Without being bound to theory, that surprising effect may be explained by an improved capping efficiency using co-transcriptional capping compared to enzymatic capping, and/or that enzymatic capping can generate intermediate cap1 structures (e.g. partial methylation of the 5′ cap and/or partial of the ribose following the 5′ cap). Both factors (reduced capping efficiency and presence of cap intermediates) may reduce the efficiency/potency of the coding RNA when used as e.g. a vaccine.

[0270] In other embodiments, the 5′-cap structure is formed via enzymatic capping using capping enzymes (e.g. vaccinia virus capping enzymes and/or cap-dependent 2′-0 methyltransferases) to generate cap0 or cap1 or cap2 structures. The 5′-cap structure (cap0 or cap1) may be added using immobilized capping enzymes and/or cap-dependent 2′-0 methyltransferases using methods and means disclosed in WO2016/193226.

[0271] In preferred embodiments, about 70%, 75%, 80%, 85%, 90%, 95% of the coding RNA (species) comprises a cap1 structure as determined using a capping assay. In preferred embodiments, less than about 20%, 15%, 10%, 5%, 4%, 3%, 2%, 1% of the coding RNA (species) does not comprises a cap1 structure as determined using a capping assay. In preferred embodiments, less than about 20%, 15%, 10%, 5%, 4%, 3%, 2%, 1% of the coding RNA (species) comprises a cap0 structure as determined using a capping assay. In preferred embodiments, less than about 20%, 15%, 10%, 5%, 4%, 3%, 2%, 1% of the coding RNA (species) comprises a cap1 intermediate structure as determined using a capping assay.

[0272] The term “coding RNA species” is not restricted to mean “one single molecule” but is understood to comprise an ensemble of essentially identical RNA molecules. Accordingly, it may relate to a plurality of essentially identical coding RNA molecules.

[0273] For determining the capping degree or the presence of cap1 intermediates, a capping assays as described in published PCT application WO2015/101416, in particular, as described in Claims 27 to 46 of published PCT application WO2015/101416 can be used. Other capping assays that may be used to determine the capping degree of the coding RNA are described in PCT/EP2018/08667, or published PCT applications WO2014/152673 and WO2014/152659.

[0274] In preferred embodiments, the coding RNA comprises an m7G(5′)ppp(5′)(2′OMeA) cap structure. In such embodiments, the coding RNA comprises a 5-terminal m7G cap, and an additional methylation of the ribose of the adjacent nucleotide of m7GpppN, in that case, a 2′O methylated Adenosine. Preferably, about 70%, 75%, 80%, 85%, 90%, 95% of the coding RNA (species) comprises such a cap1 structure as determined using a capping assay.

[0275] In other preferred embodiments, the coding RNA of the first aspect comprises an m7G(5′)ppp(5′)(2′OMeG) cap structure. In such embodiments, the coding RNA comprises a 5-terminal m7G cap, and an additional methylation of the ribose of the adjacent nucleotide, in that case, a 2′O methylated guanosine. Preferably, about 70%, 75%, 80%, 85%, 90%, 95% of the coding RNA (species) comprises such a cap1 structure as determined using a capping assay.

[0276] Accordingly, whenever reference is made to suitable RNA or mRNA sequences in the context of the invention, the first nucleotide of said RNA or mRNA sequence, that is, the nucleotide downstream of the m7G(5′)ppp structure, may be a 2′O methylated guanosine or a 2′O methylated adenosine.

[0277] In embodiments, the A/U content in the environment of the ribosome binding site of the coding RNA may be increased compared to the A/U content in the environment of the ribosome binding site of its respective wild type RNA. This modification (an increased A/U content around the ribosome binding site) increases the efficiency of ribosome binding to the coding RNA. An effective binding of the ribosomes to the ribosome binding site in turn has the effect of an efficient translation of the coding RNA.

[0278] Accordingly, in a particularly preferred embodiment, the coding RNA comprises a ribosome binding site, also referred to as “Kozak sequence” identical to or at least 80%, 85%, 90%, 95% identical to any one of the sequences SEQ ID NOs: 1821 or 1822, or fragments or variants thereof.

[0279] In preferred embodiments, the RNA of the invention comprises at least one poly(N) sequence, e.g. at least one poly(A) sequence, at least one poly(U) sequence, at least one poly(C) sequence, or combinations thereof.

[0280] In preferred embodiments, the RNA of the invention comprises at least one poly(A) sequence.

[0281] The terms “poly(A) sequence”, “poly(A) tail” or “3′-poly(A) tail” as used herein will be recognized and understood by the person of ordinary skill in the art, and are e.g. intended to be a sequence of adenosine nucleotides, typically located at the 3′-end of an RNA, of up to about 1000 adenosine nucleotides. Preferably, said poly(A) sequence is essentially homopolymeric, e.g. a poly(A) sequence of e.g. 100 adenosine nucleotides has essentially the length of 100 nucleotides. In other embodiments, the poly(A) sequence may be interrupted by at least one nucleotide different from an adenosine nucleotide, e.g. a poly(A) sequence of e.g. 100 adenosine nucleotides may have a length of more than 100 nucleotides (comprising 100 adenosine nucleotides and in addition said at least one nucleotide different from an adenosine nucleotide).

[0282] The poly(A) sequence may comprise about 10 to about 500 adenosine nucleotides, about 10 to about 200 adenosine nucleotides, about 40 to about 200 adenosine nucleotides, or about 40 to about 150 adenosine nucleotides. Suitably, the length of the poly(A) sequence may be at least about or even more than about 10, 50, 64, 75, 100, 200, 300, 400, or 500 adenosine nucleotides.

[0283] In preferred embodiments, the coding RNA comprises at least one poly(A) sequence comprising about 30 to about 200 adenosine nucleotides. In preferred embodiments, the poly(A) sequence comprises about 64 adenosine nucleotides (A64). In particularly preferred embodiments, the poly(A) sequence comprises about 100 adenosine nucleotides (A100). In particularly preferred embodiments, the poly(A) sequence comprises about 150 adenosine nucleotides.

[0284] The poly(A) sequence as defined herein is suitably located at the 3′ terminus of the coding RNA. Accordingly it is preferred that the 3-terminal nucleotide of the coding RNA (that is the last 3′-terminal nucleotide in the polynucleotide chain) is the 3′-terminal A nucleotide of the at least one poly(A) sequence. The term “located at the 3′ terminus” has to be understood as being located exactly at the 3′ terminus—in other words, the 3′ terminus of the coding RNA consists of a poly(A) sequence terminating with an A nucleotide. Examples of sequences having a 3′ terminus consisting of a poly(A) sequence are e.g. SEQ ID NOs: 586-594, 604-612, 631-639, 649-666, 676-684, 703-711, 721-738, 748-756, 775-783, 793-810, 820-828, 847-855, 865-882, 892-900, 919-927, 937-954, 964-972, 991-999, 1009-1026, 1036-1044, 1063-1071, 1081-1098, 1108-1116, 1135-1143, 1153-1170, 1180-1188, 1207-1215, 1225-1242, 1252-1260, 1279-1287, 1297-1314, 1324-1332, 1351-1359, 1369-1386, 1396-1404, 1423-1431, 1441-1458, 1468-1476, 1495-1503, 1513-1530, 1540-1548, 1567-1575, 1585-1602, 1612-1620, 1639-1647, 1657-1674, 1684-1692, 1711-1719, 1729-1737, 1862, 1863, 1866, 1867, 1872, 1873, 1875, 1876, 1898, 1907-1930. For further examples of sequences having a poly(A) sequence located (exactly) at the 3′ terminus see also Table 4 (columns with A100 or hSL-A100). The presence of a poly(A) sequence exactly at the 3′ terminus of the coding RNA encoding a Rotavirus antigenic protein (e.g. VP8*) is surprisingly advantageous and of particular importance in the context of the invention as the induction of a specific immune response against Rotavirus VP8* could be dramatically increased (see Examples 5 and 6)

[0285] Preferably, the poly(A) sequence of the RNA is obtained from a DNA template during RNA in vitro transcription. In other embodiments, the poly(A) sequence is obtained in vitro by common methods of chemical synthesis without being necessarily transcribed from a DNA template. In other embodiments, poly(A) sequences are generated by enzymatic polyadenylation of the RNA (after RNA in vitro transcription) using commercially available polyadenylation kits and corresponding protocols known in the art, or alternatively, by using immobilized poly(A)polymerases e.g. using a methods and means as described in WO2016/174271.

[0286] The coding RNA may comprise a poly(A) sequence obtained by enzymatic polyadenylation, wherein the majority of RNA molecules comprise about 100 (+/−20) to about 500 (+/−50), preferably about 250 (+/−20) adenosine nucleotides.

[0287] In embodiments, the RNA may comprise a poly(A) sequence derived from a template DNA and may additionally comprise at least one additional poly(A) sequence generated by enzymatic polyadenylation, e.g. as described in WO2016/091391.

[0288] In embodiments, the RNA may comprise at least one poly(C) sequence.

[0289] The term “poly(C) sequence” as used herein will be recognized and understood by the person of ordinary skill in the art, and are for example intended to be a sequence of cytosine nucleotides of up to about 200 cytosine nucleotides. In preferred embodiments, the poly(C) sequence comprises about 10 to about 200 cytosine nucleotides, about 10 to about 100 cytosine nucleotides, about 20 to about 70 cytosine nucleotides, about 20 to about 60 cytosine nucleotides, or about 10 to about 40 cytosine nucleotides. In a particularly preferred embodiment, the poly(C) sequence comprises about 30 cytosine nucleotides.

[0290] In particularly preferred embodiments, the coding RNA of the invention does comprise a poly(A) sequence as defined herein, preferably A100 located (exactly) at the 3′ terminus, and does not comprise a poly(C) sequence.

[0291] In a particularly preferred embodiment, the coding RNA of the invention comprises a cap1 structure as defined herein and at least one poly(A) sequence as defined in herein. Preferably, said cap1 structure is obtainable by co-transcriptional capping as defined herein, and said poly(A) sequence is preferably (exactly) at the 3′ terminus (e.g., A100, hSL-A100).

[0292] Examples of sequences having a poly(A) sequence (exactly) at the 3′ terminus (see Table 4, columns D, E, F, G) and a cap1 structure are e.g. SEQ ID NOs: 586-594, 604-612, 631-639, 649-666, 676-684, 703-711, 721-738, 748-756, 775-783, 793-810, 820-828, 847-855, 865-882, 892-900, 919-927, 937-954, 964-972, 991-999, 1009-1026, 1036-1044, 1063-1071, 1081-1098, 1108-1116, 1135-1143, 1153-1170, 1180-1188, 1207-1215, 1225-1242, 1252-1260, 1279-1287, 1297-1314, 1324-1332, 1351-1359, 1369-1386, 1396-1404, 1423-1431, 1441-1458, 1468-1476, 1495-1503, 1513-1530, 1540-1548, 1567-1575, 1585-1602, 1612-1620, 1639-1647, 1657-1674, 1684-1692, 1711-1719, 1729-1737, 1862, 1863, 1866, 1867, 1872, 1873, 1875, 1876, 1898, 1907-1930. The presence of cap1 structure and poly(A) sequence exactly at the 3′ terminus of the coding RNA encoding a Rotavirus antigenic protein (e.g. VP8*) is surprisingly advantageous and of particular importance in the context of the invention as the induction of a specific immune response against Rotavirus VP8* could be dramatically increased (see Example 4, 5, 6)

[0293] In preferred embodiments, the RNA of the first aspect comprises at least one histone stem-loop (hSL).

[0294] The term “histone stem-loop” (abbreviated as “hSL” in e.g. the sequence listing) as used herein will be recognized and understood by the person of ordinary skill in the art, and are for example intended to refer to nucleic acid sequences that are predominantly found in histone mRNAs.

[0295] Histone stem-loop sequences/structures may suitably be selected from histone stem-loop sequences as disclosed in WO2012/019780, the disclosure relating to histone stem-loop sequences/histone stem-loop structures incorporated herewith by reference. A histone stem-loop sequence that may be used within the present invention may preferably be derived from formulae (I) or (II) of WO2012/019780. According to a further preferred embodiment the coding RNA may comprise at least one histone stem-loop sequence derived from at least one of the specific formulae (Ia) or (IIa) of the patent application WO2012/019780.

[0296] In preferred embodiments, the coding RNA of the invention comprises at least one histone stem-loop sequence, wherein said histone stem-loop sequence (hSL) comprises or consists a nucleic acid sequence identical or at least 70%, 80%, 90%, 91%, 92%, 93%, 94%, 95%, 96%, 97%, 98%, or 99% identical to SEQ ID NOs: 1819 or 1820, or fragments or variants thereof.

[0297] In embodiments, the coding RNA of the invention comprises a 3′-terminal sequence element. Said 3′-terminal sequence element comprises a poly(A) sequence and a histone-stem-loop sequence, wherein said sequence element is located at the 3′ terminus (exactly at the 3′ terminus) of the RNA of the invention.

[0298] Accordingly, the RNA of the invention comprises at least one 3′-terminal sequence element comprising or consisting of a nucleic acid sequence being identical or at least 70%, 80%, 90%, 91%, 92%, 93%, 94%, 95%, 96%, 97%, 98%, or 99% identical to SEQ ID NOs: 1825-1856, or a fragment or variant thereof.

[0299] A preferred 3′-terminal sequence element is hSL-A100 according to SEQ ID NOs: 1827, 1836 or 1837. A further preferred 3′-terminal sequence element is A100 according to SEQ ID NOs: 1826, 1834 or 1835.

[0300] In various embodiments, the RNA may comprise a 5′-terminal sequence element according to SEQ ID NOs: 1823 or 1824, or a fragment or variant thereof. Such a 5′-terminal sequence element comprises e.g. a binding site for T7 RNA polymerase. Further, the first nucleotide of said 5′-terminal start sequence may preferably comprise a 2′O methylation, e.g. 2′O methylated guanosine or a 2′O methylated adenosine.

[0301] In embodiments, the RNA may comprise a sequence element which represents a cleavage site for a catalytic nucleic acid molecule, wherein the catalytic nucleic acid molecule may be a Ribozyme or a DNAzyme. Said elements may, e.g., allow for the analysis of capping efficiency/quality of the RNA as described in WO2015/101416, or allow for the analysis of poly(N) sequences length/quality of the RNA as described in WO2017/001058. A cleavage site for a catalytic nucleic acid molecule may be located in proximity to the 5′ terminus of the RNA (that is, about 1, 2, 3, 4, 5, 6, 7, 8, 9, 10, 1-30, 1-20, 5-15 nucleotides from the 5′-terminal cap structure). Alternatively, or in addition, a cleavage site for a catalytic nucleic acid molecule as described above may also be positioned in proximity to the 3′ terminus of the RNA (that is, about 50-300, 50-200, 50-150 nucleotides from the 3′ terminus). Said elements may, e.g., allow for the analysis of poly(N) sequences length/quality of the RNA as described in WO2017/001058.

[0302] UTRs:

[0303] The RNA of the invention may comprise a protein-coding region (“coding sequence” or “cds”), and 5′-UTR and/or 3′-UTR. Notably, UTRs may harbor regulatory sequence elements that determine RNA turnover, stability, and localization. Moreover, UTRs may harbor sequence elements that enhance translation. In medical application of RNA, translation of the RNA into at least one peptide or protein is of paramount importance to therapeutic efficacy. Certain combinations of 3′-UTRs and/or 5′-UTRs may enhance the expression of operably linked coding sequences encoding peptides or proteins of the invention. RNA molecules harboring said UTR combinations advantageously enable rapid and transient expression of antigenic peptides or proteins after administration to a subject, preferably after intramuscular administration. Accordingly, the coding RNA comprising certain combinations of 3′-UTRs and/or 5′-UTRs as provided herein is particularly suitable for administration as a vaccine, in particular, suitable for administration into the muscle, the dermis, or the epidermis of a subject.

[0304] Suitably, the coding RNA may comprise at least one heterologous 5′-UTR and/or at least one heterologous 3′-UTR. Said heterologous 5′-UTRs or 3′-UTRs may be derived from naturally occurring genes or may be synthetically engineered. In preferred embodiments, the RNA of the first aspect comprises at least one coding sequence operably linked to at least one (heterologous) 3′-UTR and/or at least one (heterologous) 5′-UTR.

[0305] In preferred embodiments, the coding RNA comprises at least one heterologous 3′-UTR.

[0306] The term “3′-untranslated region” or “3′-UTR” or “3′-UTR element” will be recognized and understood by the person of ordinary skill in the art, and are e.g. intended to refer to a part of a nucleic acid molecule located 3′ (i.e. downstream) of a coding sequence and which is not translated into protein. A 3′-UTR may be part of an RNA, e.g. an mRNA, located between a cds and a terminal poly(A) sequence. A 3′-UTR may comprise elements for controlling gene expression, also called regulatory elements. Such regulatory elements may be, e.g., ribosomal binding sites, miRNA binding sites etc.

[0307] Preferably the coding RNA comprises a 3′-UTR, which may be derivable from a gene that relates to an RNA with enhanced half-life (i.e. that provides a stable RNA).

[0308] In some embodiments, a 3′-UTR comprises one or more of a polyadenylation signal, a binding site for proteins that affect an RNA stability of location in a cell, or one or more miRNA or binding sites for miRNAs.

[0309] MicroRNAs (or miRNA) are 19-25 nucleotide long noncoding RNAs that bind to the 3′-UTR of nucleic acid molecules and down-regulate gene expression either by reducing nucleic acid molecule stability or by inhibiting translation. E.g., microRNAs are known to regulate RNA, and thereby protein expression, e.g. in liver (miR-122), heart (miR-Id, miR-149), endothelial cells (miR-17-92, miR-126), adipose tissue (let-7, miR-30c), kidney (miR-192, miR-194, miR-204), myeloid cells (miR-142-3p, miR-142-5p, miR-16, miR-21, miR-223, miR-24, miR-27), muscle (miR-133, miR-206, miR-208), and lung epithelial cells (let-7, miR-133, miR-126). The RNA may comprise one or more microRNA target sequences, microRNA sequences, or microRNA seeds. Such sequences may e.g. correspond to any known microRNA such as those taught in US2005/0261218 and US2005/0059005.

[0310] Accordingly, miRNA, or binding sites miRNAs as defined above may be removed from the 3′-UTR or introduced into the 3′-UTR in order to tailor the expression of the RNA to desired cell types or tissues (e.g. muscle cells).

[0311] In preferred embodiments of the first aspect, the coding RNA comprises at least one heterologous 3′-UTR, wherein the at least one heterologous 3′-UTR comprises a nucleic acid sequence derived from a 3′-UTR of a gene selected from PSMB3, ALB7, alpha-globin (referred to as “muag”), CASP1, COX6B1, GNAS, NDUFA1 and RPS9, or from a homolog, a fragment or variant of any one of these genes according to SEQ ID NOs: 1803-1818. Particularly preferred nucleic acid sequences in that context can be derived from published PCT application WO2019/077001A1, in particular, claim 9 of WO2019/077001A1. The corresponding 3′-UTR sequences of claim 9 of WO2019/077001A1 are herewith incorporated by reference (e.g., SEQ ID NOs: 23-34 of WO2019/077001A1, or fragments or variants thereof).

[0312] In embodiments, the RNA may comprise a 3′-UTR derived from an alpha-globin gene. Said 3′-UTR derived from a alpha-globin gene (“muag”) may comprise or consist of a nucleic acid sequence being identical or at least 70%, 80%, 85%, 86%, 87%, 88%, 89%, 90%, 91%, 92%, 93%, 94%, 95%, 96%, 97%, 98%, or 99% identical to SEQ ID NOs: 1817 or 1818 or a fragment or a variant thereof.

[0313] In preferred embodiments, the RNA may comprise a 3′-UTR derived from a PSMB3 gene. Said 3′-UTR derived from a PSMB3 gene may comprise or consist of a nucleic acid sequence being identical or at least 70%, 80%, 85%, 86%, 87%, 88%, 89%, 90%, 91%, 92%, 93%, 94%, 95%, 96%, 97%, 98%, or 99% identical to SEQ ID NOs: 1803 or 1804 or a fragment or a variant thereof.

[0314] In other embodiments, the coding RNA may comprise a 3′-UTR as described in WO2016/107877, the disclosure of WO2016/107877 relating to 3′-UTR sequences herewith incorporated by reference. Suitable 3-UTRs are SEQ ID NOs: 1-24 and SEQ ID NOs: 49-318 of WO2016/107877, or fragments or variants of these sequences. In other embodiments, the coding RNA comprises a 3′-UTR as described in WO2017/036580, the disclosure of WO2017/036580 relating to 3′-UTR sequences herewith incorporated by reference. Suitable 3′-UTRs are SEQ ID NOs: 152-204 of WO2017/036580, or fragments or variants of these sequences. In other embodiments, the coding RNA comprises a 3′-UTR as described in WO2016/022914, the disclosure of WO2016/022914 relating to 3′-UTR sequences herewith incorporated by reference. Particularly preferred 3′-UTRs are nucleic acid sequences according to SEQ ID NOs: 20-36 of WO2016/022914, or fragments or variants of these sequences.

[0315] In preferred embodiments, the coding RNA comprises at least one heterologous 5′-UTR.

[0316] The terms “5′-untranslated region” or “5′-UTR” or “5′-UTR element” will be recognized and understood by the person of ordinary skill in the art, and are e.g. intended to refer to a part of a nucleic acid molecule located 5′ (i.e. “upstream”) of a coding sequence and which is not translated into protein. A 5′-UTR may be part of an RNA located 5′ of the coding sequence. Typically, a 5′-UTR starts with the transcriptional start site and ends before the start codon of the coding sequence. A 5′-UTR may comprise elements for controlling gene expression, also called regulatory elements. Such regulatory elements may be, e.g., ribosomal binding sites, miRNA binding sites etc. The 5′-UTR may be post-transcriptionally modified, e.g. by enzymatic or post-transcriptional addition of a 5′-cap structure (as defined above).

[0317] Preferably the coding RNA comprises a 5′-UTR, which may be derivable from a gene that relates to an RNA with enhanced half-life (i.e. that provides a stable RNA).

[0318] In some embodiments, a 5′-UTR comprises one or more of a binding site for proteins that affect an RNA stability of location in a cell, or one or more miRNA or binding sites for miRNAs (as defined above).

[0319] Accordingly, miRNA or binding sites miRNAs as defined above may be removed from the 5′-UTR or introduced into the 5′-UTR in order to tailor the expression of the RNA to desired cell types or tissues.

[0320] In preferred embodiments, the coding RNA comprises at least one heterologous 5′-UTR, wherein the at least one heterologous 5′-UTR comprises a nucleic acid sequence derived from a 5′-UTR of gene selected from HSD17B4, RPL32, ASAH1, ATP5A1, MP68, NDUFA4, NOSIP, RPL31, SLC7A3, TUBB4B, and UBQLN2, or from a homolog, a fragment or variant of any one of these genes according to SEQ ID NOs: 1781-1802. Particularly preferred nucleic acid sequences in that context can be selected from published PCT application WO2019/077001A1, in particular, claim 9 of WO2019/077001A1. The corresponding 5′-UTR sequences of claim 9 of WO2019/077001A1 are herewith incorporated by reference (e.g., SEQ ID NOs: 1-20 of WO2019/077001A1, or fragments or variants thereof).

[0321] In preferred embodiments, the RNA may comprise a 5′-UTR derived from a HSD17B4 gene, wherein said 5′-UTR derived from a HSD1764 gene comprises or consists of a nucleic acid sequence being identical or at least 70%, 80%, 85%, 86%, 87%, 88%, 89%, 90%, 91%, 92%, 93%, 94%, 95%, 96%, 97%, 98%, or 99% identical to SEQ ID NOs: 1781 or 1782 or a fragment or a variant thereof.

[0322] In other embodiments, the coding RNA comprises a 5′-UTR as described in WO2013/143700, the disclosure of WO2013/143700 relating to 5′-UTR sequences herewith incorporated by reference. Particularly preferred 5′-UTRs are nucleic acid sequences derived from SEQ ID NOs: 1-1363, SEQ ID NO: 1395, SEQ ID NO: 1421 and SEQ ID NO: 1422 of WO2013/143700, or fragments or variants of these sequences. In other embodiments, the coding RNA comprises a 5′-UTR as described in WO2016/107877, the disclosure of WO2016/107877 relating to 5′-UTR sequences herewith incorporated by reference. Particularly preferred 5′-UTRs are nucleic acid sequences according to SEQ ID NOs: 25-30 and SEQ ID NOs: 319-382 of WO2016/107877, or fragments or variants of these sequences. In other embodiments, the coding RNA comprises a 5′-UTR as described in WO2017/036580, the disclosure of WO2017/036580 relating to 5′-UTR sequences herewith incorporated by reference. Particularly preferred 5′-UTRs are nucleic acid sequences according to SEQ ID NOs: 1-151 of WO2017/036580, or fragments or variants of these sequences. In other embodiments, the coding RNA comprises a 5′-UTR as described in WO2016/022914, the disclosure of WO2016/022914 relating to 5′-UTR sequences herewith incorporated by reference. Particularly preferred 5′-UTRs are nucleic acid sequences according to SEQ ID NOs: 3-19 of WO2016/022914, or fragments or variants of these sequences.

[0323] In preferred embodiments of the coding RNA comprises at least one coding sequence as specified herein encoding at least one antigenic protein as defined herein, preferably VP8*, wherein said coding sequence is operably linked to a 5′-UTR selected from HSD17B4, RPL32, ASAH1, ATP5A1, MP68, NDUFA4, NOSIP, RPL31, SLC7A3, TUBB4B, and UBQLN2, or from a homolog, a fragment or variant of any one of these genes according to SEQ ID NOs: 1781-1802 and a 3′-UTR selected from PSMB3, ALB7, alpha-globin (referred to as “muag”), CASP1, COX6B1, GNAS, NDUFA1 and RPS9, or from a homolog, a fragment or variant of any one of these genes according to SEQ ID NOs: 1803-1818.

[0324] In preferred embodiments of the coding RNA comprises at least one coding sequence as specified herein encoding at least one antigenic protein as defined herein, preferably VP8*, wherein said coding sequence is operably linked to a 5′-UTR and a 3′-UTR derived from published PCT application WO2019/077001A1, in particular, claim 9 of WO2019/077001A1. The corresponding 3′-UTR sequences of claim 9 of WO2019/077001A1 are herewith incorporated by reference (e.g., SEQ ID NOs: 23-34 of WO2019/077001A1, or fragments or variants thereof) and the corresponding 5′-UTR sequences of claim 9 of WO2019/077001A1 are herewith incorporated by reference (e.g., SEQ ID NOs: 1-20 of WO2019/077001A1, or fragments or variants thereof).

[0325] In particularly preferred embodiments of the coding RNA comprises at least one coding sequence as specified herein encoding at least one antigenic protein as defined herein, preferably VP8*, wherein said coding sequence is operably linked to a 5′-UTR selected from HSD17B4 and a 3′-UTR selected from PSMB3 (HSD17B4/PSMB3).

[0326] Accordingly, the RNA of the first aspect comprises at least one coding sequence encoding at least one peptide or protein as defined herein, wherein said coding sequence as defined herein is operably linked to at least one heterologous 5′-UTR and/or to at least one heterologous 3′-UTR, wherein suitably
[0327] the at least one heterologous 5′-UTR is derived from a 5′-UTR of a HSD17B4 gene, or from a corresponding RNA sequence, homolog, fragment or variant thereof and the at least one 3′-UTR is derived from a 3′-UTR of a PSMB3 gene, or from a corresponding RNA sequence, homolog, fragment or variant thereof, wherein, preferably, said 5′-UTR comprises or consists of a nucleic acid sequence being identical or at least 70%, 80%, 85%, 86%, 87%, 88%, 89%, 90%, 91%, 92%, 93%, 94%, 95%, 96%, 97%, 98%, or 99% identical to SEQ ID NOs: 1781 or 1782 or a fragment or a variant thereof, and said 3′-UTR comprises or consists of a nucleic acid sequence being identical or at least 70%, 80%, 85%, 86%, 87%, 88%, 89%, 90%, 91%, 92%, 93%, 94%, 95%, 96%, 97%, 98%, or 99% identical to SEQ ID NOs: 1803 or 1804 or a fragment or a variant thereof
[0328] the at least one heterologous 3′-UTR is derived from a 3′-UTR of a alpha-globin gene gene (muag), or from a corresponding RNA sequence, homolog, fragment or variant thereof wherein, preferably, said 3′-UTR comprises or consists of a nucleic acid sequence being identical or at least 70%, 80%, 85%, 86%, 87%, 88%, 89%, 90%, 91%, 92%, 93%, 94%, 95%, 96%, 97%, 98%, or 99% identical to SEQ ID NOs: 1817 or 1818 or a fragment or a variant thereof.

[0329] Suitable Coding RNA for a Rotavirus Vaccine:

[0330] In various embodiments the coding RNA comprises, preferably in 5′- to 3′-direction, the following elements:
[0331] A) 5′-cap structure, preferably as specified herein;
[0332] B) 5-terminal start element, preferably as specified herein;
[0333] C) optionally, a cleavage site for a catalytic nucleic acid molecule, preferably as specified herein;
[0334] D) optionally, a 5′-UTR, preferably as specified herein;
[0335] E) a ribosome binding site, preferably as specified herein;
[0336] F) at least one coding sequence, preferably as specified herein;
[0337] G) 3′-UTR, preferably as specified herein;
[0338] H) optionally, poly(A) sequence, preferably as specified herein;
[0339] I) optionally, poly(C) sequence, preferably as specified herein;
[0340] J) optionally, histone stem-loop preferably as specified herein;
[0341] K) optionally, 3-terminal sequence element, preferably as specified herein.

[0342] In preferred embodiments the coding RNA, preferably the mRNA, comprises the following elements preferably in 5′- to 3′-direction:
[0343] A) 5′-cap structure selected from m7G(5′), m7G(5′)ppp(5′)(2′OMeA), or m7G(5′)ppp(5′)(2′OMeG);
[0344] B) 5-terminal start element selected from SEQ ID NOs: 1823, 1824 or fragments or variants thereof;
[0345] C) optionally, a cleavage site for a catalytic nucleic acid molecule, preferably as specified herein;
[0346] D) optionally, a 5′-UTR derived from a HSD17B4 gene;
[0347] E) a ribosome binding site selected from SEQ ID NOs: 1821, 1822 or fragments or variants thereof;
[0348] F) at least one coding sequence selected from SEQ ID NOs: 118-585, 1901-1906, or fragments or variants thereof;
[0349] G) 3′-UTR derived from a 3′-UTR of a PSMB3 gene or an alpha-globin gene (muag);
[0350] H) optionally, poly(A) sequence comprising about 30 to about 500 adenosines;
[0351] I) optionally, poly(C) sequence comprising about 10 to about 100 cytosines;
[0352] J) optionally, histone stem-loop selected from SEQ ID NOs: 1819 or 1820;
[0353] K) optionally, 3′-terminal sequence element SEQ ID NOs: 1825-1856.

[0354] In particularly preferred embodiments the mRNA comprises the following elements in 5′- to 3′-direction:
[0355] A) cap1 structure, preferably obtainable by co-transcriptional capping as defined herein;
[0356] B) 5′-UTR derived from a HSD1784 gene as defined herein, preferably according to SEQ ID NO: 1781 or 1782;
[0357] C) coding sequence selected from SEQ ID NOs: 118-585, 1901-1906 or fragments or variants thereof;
[0358] D) 3′-UTR derived from a 3′-UTR of a PSMB3 gene as defined herein, preferably according to SEQ ID NO: 1803 or 1804;
[0359] E) optionally, histone stem-loop selected from SEQ ID NOs: 1819 or 1820;
[0360] F) poly(A) sequence comprising about 100 A nucleotides, representing the 3′ terminus.

[0361] Preferred amino acid sequences and coding RNA/mRNA sequences of the invention are provided in Table 4. Therein, each row represents a specific suitable Rotavirus VP8* construct of the invention (compare with Table 1 and Table 3, columns A and B as reference), wherein the description of the Rotavirus VP8* construct is indicated in column A, column B of Table 4 provides a description of the Rotavirus of which the respective VP8* is derived from, the SEQ ID NOs of the amino acid sequence of the respective Rotavirus VP8* construct is provided in column C.

[0362] The corresponding SEQ ID NOs of the coding sequences encoding the respective Rotavirus VP8* constructs are provided in in Table 3 (wild type cds) and D (opt1, opt4, opt5). Further information is provided under <223> identifier of the respective SEQ ID NOs in the sequence listing.

[0363] The corresponding coding RNA sequences, in particular mRNA sequences comprising preferred coding sequences are provided in columns D, E, F, and G, wherein column D provides RNA sequences with an UTR combination “HSD17B4/PSMB3” as defined herein and a poly(A) sequence exactly at the 3′ terminus (A100), wherein column E provides RNA sequences with an “alpha-globin” UTR as defined herein and a poly(A) sequence exactly at the 3′ terminus (A100), wherein column F provides RNA sequences with an UTR combination “HSD17B4/PSMB3” as defined herein and a poly(A) sequence exactly at the 3′ terminus (hSL-A100) and wherein column G provides RNA sequences with an “alpha-globin” UTR as defined herein and a poly(A) sequence exactly at the 3′ terminus (hSL-A100).

TABLE 4
Preferred coding RNA, e.g. mRNA, encoding Rotavirus VP8* antigen constructs

| A | B | C | D | E | F | G |
|---|---|---|---|---|---|---|
| P2_VP8*(65-223) | RVA/BE1058/P[4] | 6, 46 | 586, 658, | 874, 946, | 1162, 1234, | 1450, 1522, |
| | | | 730, 802, | 1018, 1090, | 1306, 1378, | 1594, 1666, |
| | | | 1909 | 1915 | 1921 | 1927 |
| P2_VP8*(65-223) | RVA/DS-1/P[4] | 47 | 587, 659, | 875, 947, | 1163, 1235, | 1451, 1523, |
| | | | 731, 803 | 1019, 1091 | 1307, 1379 | 1595, 1667 |
| P2_VP8*(65-223) | RVA/DS-1/P[4] | 48 | 588, 660, | 876, 948, | 1164, 1236, | 1452, 1524, |
| | | | 732, 804 | 1020, 1092 | 1308, 1380 | 1596, 1668 |
| P2_VP8*(65-223) | RVA/F01322/P[6] | 5, 49 | 589, 661, | 877, 949, | 1165, 1237, | 1453, 1525, |
| | | | 733, 805, | 1021, 1093, | 1309, 1381, | 1597, 1669, |
| | | | 1910 | 1916 | 1922 | 1928 |
| P2_VP8*(65-223) | RVA/1076/P[6] | 50 | 590, 662, | 878, 950, | 1166, 1238, | 1454, 1526, |
| | | | 734, 806 | 1022, 1094 | 1310, 1382 | 1598, 1670 |
| P2_VP8*(65-223) | RVA/BE1128/P[8] | 4, 51 | 591, 663, | 879, 951, | 1167, 1239, | 1455, 1527, |
| | | | 735, 807 | 1023, 1095 | 1311, 1383 | 1599, 1671 |
| P2_VP8*(65-223) | RVA/Wa- | 52 | 592, 664, | 880, 952, | 1168, 1240, | 1456, 1528, |
| | VirWa/P[8] | | 736, 808 | 1024, 1096 | 1312, 1384 | 1600, 1672 |
| P2_VP8*(65-223) | RVA/Wa/P[8] | 53 | 593, 665, | 881, 953, | 1169, 1241, | 1457, 1529, |
| | | | 737, 809 | 1025, 1097 | 1313, 1385 | 1601, 1673 |
| P2_VP8*(65-223) | RVA/Wa/P[8] | 54 | 594, 666, | 882, 954, | 1170, 1242, | 1458, 1530, |
| | | | 738, 810 | 1026, 1098 | 1314, 1386 | 1602, 1674 |
| P2_VP8*(41-223) | RVA/BE1058/P[4] | 55 | 595, 667, | 883, 955, | 1171, 1243, | 1459, 1531, |
| | | | 739, 811 | 1027, 1099 | 1315, 1387 | 1603, 1675 |
| P2_VP8*(41-223) | RVA/DS-1/P[4] | 56 | 596, 668, | 884, 956, | 1172, 1244, | 1460, 1532, |
| | | | 740, 812 | 1028, 1100 | 1316, 1388 | 1604, 1676 |
| P2_VP8*(41-223) | RVA/DS-1/P[4] | 57 | 597, 669, | 885, 957, | 1173, 1245, | 1461, 1533, |
| | | | 741, 813 | 1029, 1101 | 1317, 1389 | 1605, 1677 |
| P2_VP8*(41-223) | RVA/F01322/P[6] | 58 | 598, 670, | 886, 958, | 1174, 1246, | 1462, 1534, |
| | | | 742, 814 | 1030, 1102 | 1318, 1390 | 1606, 1678 |
| P2_VP8*(41-223) | RVA/1076/P[6] | 59 | 599, 671, | 887, 959, | 1175, 1247, | 1463, 1535, |
| | | | 743, 815 | 1031, 1103 | 1319, 1391 | 1607, 1679 |
| P2_VP8*(41-223) | RVA/BE1128/P[8] | 60 | 600, 672, | 888, 960, | 1176, 1248, | 1464, 1536, |
| | | | 744, 816 | 1032, 1104 | 1320, 1392 | 1608, 1680 |
| P2_VP8*(41-223) | RVA/Wa- | 61 | 601, 673, | 889, 961, | 1177, 1249, | 1465, 1537, |
| | VirWa/P[8] | | 745, 817 | 1033, 1105 | 1321, 1393 | 1609, 1681 |
| P2_VP8*(41-223) | RVA/Wa/P[8] | 62 | 602, 674, | 890, 962, | 1178, 1250, | 1466, 1538, |
| | | | 746, 818 | 1034, 1106 | 1322, 1394 | 1610, 1682 |
| P2_VP8*(41-223) | RVA/Wa/P[8] | 63 | 603, 675, | 891, 963, | 1179, 1251, | 1467, 1539, |
| | | | 747, 819 | 1035, 1107 | 1323, 1395 | 1611, 1683 |
| P2_VP8*(65-223)_Ferritin | RVA/BE1058/P[4] | 64 | 604, 676, | 892, 964, | 1180, 1252, | 1468, 1540, |
| | | | 748, 820 | 1036, 1108 | 1324, 1396 | 1612, 1684 |
| P2_VP8*(65-223)_Ferritin | RVA/DS-1/P[4] | 65 | 605, 677, | 893, 965, | 1181, 1253, | 1469, 1541, |
| | | | 749, 821 | 1037, 1109 | 1325, 1397 | 1613, 1685 |
| P2_VP8*(65-223)_Ferritin | RVA/DS-1/P[4] | 66 | 606, 678, | 894, 966, | 1182, 1254, | 1470, 1542, |
| | | | 750, 822 | 1038, 1110 | 1326, 1398 | 1614, 1686 |
| P2_VP8*(65-223)_Ferritin | RVA/F01322/P[6] | 67 | 607, 679, | 895, 967, | 1183, 1255, | 1471, 1543, |
| | | | 751, 823 | 1039, 1111 | 1327, 1399 | 1615, 1687 |
| P2_VP8*(65-223)_Ferritin | RVA/1076/P[6] | 68 | 608, 680, | 896, 968, | 1184, 1256, | 1472, 1544, |
| | | | 752, 824 | 1040, 1112 | 1328, 1400 | 1616, 1688 |
| P2_VP8*(65-223)_Ferritin | RVA/BE1128/P[8] | 69 | 609, 681, | 897, 969, | 1185, 1257, | 1473, 1545, |
| | | | 753, 825 | 1041, 1113 | 1329, 1401 | 1617, 1689 |
| P2_VP8*(65-223)_Ferritin | RVA/Wa- | 70 | 610, 682, | 898, 970, | 1186, 1258, | 1474, 1546, |
| | VirWa/P[8] | | 754, 826 | 1042, 1114 | 1330, 1402 | 1618, 1690 |
| P2_VP8*(65-223)_Ferritin | RVA/Wa/P[8] | 71 | 611, 683, | 899, 971, | 1187, 1259, | 1475, 1547, |
| | | | 755, 827 | 1043, 1115 | 1331, 1403 | 1619, 1691 |
| P2_VP8*(65-223)_Ferritin | RVA/Wa/P[8] | 72 | 612, 684, | 900, 972, | 1188, 1260, | 1476, 1548, |
| | | | 756, 828 | 1044, 1116 | 1332, 1404 | 1620, 1692 |
| P2_VP8*(41-223)_Ferritin | RVA/BE1058/P[4] | 73 | 613, 685, | 901, 973, | 1189, 1261, | 1477, 1549, |
| | | | 757, 829 | 1045, 1117 | 1333, 1405 | 1621, 1693 |
| P2_VP8*(41-223)_Ferritin | RVA/DS-1/P[4] | 74 | 614, 686, | 902, 974, | 1190, 1262, | 1478, 1550, |
| | | | 758, 830 | 1046, 1118 | 1334, 1406 | 1622, 1694 |
| P2_VP8*(41-223)_Ferritin | RVA/DS-1/P[4] | 75 | 615, 687, | 903, 975, | 1191, 1263, | 1479, 1551, |
| | | | 759, 831 | 1047, 1119 | 1335, 1407 | 1623, 1695 |
| P2_VP8*(41-223)_Ferritin | RVA/F01322/P[6] | 76 | 616, 688, | 904, 976, | 1192, 1264, | 1480, 1552, |
| | | | 760, 832 | 1048, 1120 | 1336, 1408 | 1624, 1696 |
| P2_VP8*(41-223)_Ferritin | RVA/1076/P[6] | 77 | 617, 689, | 905, 977, | 1193, 1265, ' | 1481, 1553, |
| | | | 761, 833 | 1049, 1121 | 1337, 1409 | 1625, 1697 |
| P2_VP8*(41-223)_Ferritin | RVA/BE1128/P[8] | 78 | 618, 690, | 906, 978, | 1194, 1266, | 1482, 1554, |
| | | | 762, 834 | 1050, 1122 | 1338, 1410 | 1626, 1698 |
| P2_VP8*(41-223)_Ferritin | RVA/Wa- | 79 | 619, 691, | 907, 979, | 1195, 1267, | 1483, 1555, |
| | VirWa/P[8] | | 763, 835 | 1051, 1123 | 1339, 1411 | 1627, 1699 |
| P2_VP8*(41-223)_Ferritin | RVA/Wa/P[8] | 80 | 620, 692, | 908, 980, | 1196, 1268, | 1484, 1556, |
| | | | 764, 836 | 1052, 1124 | 1340, 1412 | 1628, 1700 |
| P2_VP8*(41-223)_Ferritin | RVA/Wa/P[8] | 81 | 621, 693, | 909, 981, | 1197, 1269, | 1485, 1557, |
| | | | 765, 837 | 1053, 1125 | 1341, 1413 | 1629, 1701 |
| LumSynt_P2_VP8*(65- | RVA/BE1058/P[4] | 82 | 622, 694, | 910, 982, | 1198, 1270, | 1486, 1558, |
| 223) | | | 766, 838 | 1054, 1126 | 1342, 1414 | 1630, 1702 |
| LumSynt_P2_VP8*(65- | RVA/DS-1/P[4] | 83 | 623, 695, | 911, 983, | 1199, 1271, | 1487, 1559, |
| 223) | | | 767, 839 | 1055, 1127 | 1343, 1415 | 1631, 1703 |
| LumSynt_P2_VP8*(65- | RVA/DS-1/P[4] | 84 | 624, 696, | 912, 984, | 1200, 1272, | 1488, 1560, |
| 223) | | | 768, 840 | 1056, 1128 | 1344, 1416 | 1632, 1704 |
| LumSynt_P2_VP8*(65- | RVA/F01322/P[6] | 85 | 625, 697, | 913, 985, | 1201, 1273, | 1489, 1561, |
| 223) | | | 769, 841 | 1057, 1129 | 1345, 1417 | 1633, 1705 |
| LumSynt_P2_VP8*(65- | RVA/1076/P[6] | 86 | 626, 698, | 914, 986, | 1202, 1274, | 1490, 1562, |
| 223) | | | 770, 842 | 1058, 1130 | 1346, 1418 | 1634, 1706 |
| LumSynt_P2_VP8*(65- | RVA/BE1128/P[8] | 87 | 627, 699, | 915, 987, | 1203, 1275, | 1491, 1563, |
| 223) | | | 771, 843 | 1059, 1131 | 1347, 1419 | 1635, 1707 |
| LumSynt_P2_VP8*(65- | RVA/Wa- | 88 | 628, 700, | 916, 988, | 1204, 1276, | 1492, 1564, |
| 223) | VirWa/P[8] | | 772, 844 | 1060, 1132 | 1348, 1420 | 1636, 1708 |
| LumSynt_P2_VP8*(65- | RVA/Wa/P[8] | 89 | 629, 701, | 917, 989, | 1205, 1277, | 1493, 1565, |
| 223) | | | 773, 845 | 1061, 1133 | 1349, 1421 | 1637, 1709 |
| LumSynt_P2_VP8*(65- | RVA/Wa/P[8] | 90 | 630, 702, | 918, 990, | 1206, 1278, | 1494, 1566, |
| 223) | | | 774, 846 | 1062, 1134 | 1350, 1422 | 1638, 1710 |
| LumSynt_P2_VP8*(41- | RVA/BE1058/P[4] | 3, 91 | 631, 703, | 919, 991, | 1207, 1279, | 1495, 1567, |
| 223) | | | 775, 847, | 1063, 1135, | 1351, 1423, | 1639, 1711, |
| | | | 1911 | 1917 | 1923 | 1929 |
| LumSynt_P2_VP8*(41- | RVA/DS-1/P[4] | 92 | 632, 704, | 920, 992, | 1208, 1280, | 1496, 1568, |
| 223) | | | 776, 848 | 1064, 1136 | 1352, 1424 | 1640, 1712 |
| LumSynt_P2_VP8*(41- | RVA/DS-1/P[4] | 93 | 633, 705, | 921, 993, | 1209, 1281, | 1497, 1569, |
| 223) | | | 777, 849 | 1065, 1137 | 1353, 1425 | 1641, 1713 |
| LumSynt_P2_VP8*(41- | RVA/F01322/P[6] | 2, 94 | 634, 706, | 922, 994, | 1210, 1282, | 1498, 1570, |
| 223) | | | 778, 850, | 1066, 1138, | 1354, 1426, | 1642, 1714, |
| | | | 1912 | 1918 | 1924 | 1930 |
| LumSynt_P2_VP8*(41- | RVA/1076/P[6] | 95 | 635, 707, | 923, 995, | 1211, 1283, | 1499, 1571, |
| 223) | | | 779, 851 | 1067, 1139 | 1355, 1427 | 1643, 1715 |
| LumSynt_P2_VP8*(41- | RVA/BE1128/P[8] | 1, 96 | 636, 708, | 924, 996, | 1212, 1284, | 1500, 1572, |
| 223) | | | 780, 852 | 1068, 1140 | 1356, 1428 | 1644, 1716 |
| LumSynt_P2_VP8*(41- | RVA/Wa- | 97 | 637, 709, | 925, 997, | 1213, 1285, | 1501, 1573, |
| 223) | VirWa/P[8] | | 781, 853 | 1069, 1141 | 1357, 1429 | 1645, 1717 |
| LumSynt_P2_VP8*(41- | RVA/Wa/P[8] | 98 | 638, 710, | 926, 998, | 1214, 1286, | 1502, 1574, |
| 223) | | | 782, 854 | 1070, 1142 | 1358, 1430 | 1646, 1718 |
| LumSynt_P2_VP8*(41- | RVA/Wa/P[8] | 99 | 639, 711, | 927, 999, | 1215, 1287, | 1503, 1575, |
| 223) | | | 783, 855 | 1071, 1143 | 1359, 1431 | 1647, 1719 |
| SP-IgE_P2_VP8*(65-223) | RVA/BE1058/P[4] | 100 | 640, 712, | 928, 1000, | 1216, 1288, | 1504, 1576, |
| | | | 784, 856 | 1072, 1144 | 1360, 1432 | 1648, 1720 |
| SP-IgE_P2_VP8*(65-223) | RVA/DS-1/P[4] | 101 | 641, 713, | 929, 1001, | 1217, 1289, | 1505, 1577, |
| | | | 785, 857 | 1073, 1145 | 1361, 1433 | 1649, 1721 |
| SP-IgE_P2_VP8*(65-223) | RVA/DS-1/P[4] | 102 | 642, 714, | 930, 1002, | 1218, 1290, | 1506, 1578, |
| | | | 786, 858 | 1074, 1146 | 1362, 1434 | 1650, 1722 |
| SP-IgE_P2_VP8*(65-223) | RVA/F01322/P[6] | 103 | 643, 715, | 931, 1003, | 1219, 1291, | 1507, 1579, |
| | | | 787, 859 | 1075, 1147 | 1363, 1435 | 1651, 1723 |
| SP-IgE_P2_VP8*(65-223) | RVA/1076/P[6] | 104 | 644, 716, | 932, 1004, | 1220, 1292, | 1508, 1580, |
| | | | 788, 860 | 1076, 1148 | 1364, 1436 | 1652, 1724 |
| SP-IgE_P2_VP8*(65-223) | RVA/BE1128/P[8] | 105 | 645, 717, | 933, 1005, | 1221, 1293, | 1509, 1581, |
| | | | 789, 861 | 1077, 1149 | 1365, 1437 | 1653, 1725 |
| SP-IgE_P2_VP8*(65-223) | RVA/Wa- | 106 | 646, 718, | 934, 1006, | 1222, 1294, | 1510, 1582, |
| | VirWa/P[8] | | 790, 862 | 1078, 1150 | 1366, 1438 | 1654, 1726 |
| SP-IgE_P2_VP8*(65-223) | RVA/Wa/P[8] | 107 | 647, 719, | 935, 1007, | 1223, 1295, | 1511, 1583, |
| | | | 791, 863 | 1079, 1151 | 1367, 1439 | 1655, 1727 |
| SP-IgE_P2_VP8*(65-223) | RVA/Wa/P[8] | 108 | 648, 720, | 936, 1008, | 1224, 1296, | 1512, 1584, |
| | | | 792, 864 | 1080, 1152 | 1368, 1440 | 1656, 1728 |
| SP-IgE_P2_VP8*(41-223) | RVA/BE1058/P[4] | 109 | 649, 721, | 937, 1009, | 1225, 1297, | 1513, 1585, |
| | | | 793, 865 | 1081, 1153 | 1369, 1441 | 1657, 1729 |
| SP-IgE_P2_VP8*(41-223) | RVA/DS-1/P[41 | 110 | 650, 722, | 938, 1010, | 1226, 1298, | 1514, 1586, |
| | | | 794, 866 | 1082, 1154 | 1370, 1442 | 1658, 1730 |
| SP-IgE_P2_VP8*(41-223) | RVA/DS-1/P[4] | 111 | 651, 723, | 939, 1011, | 1227, 1299, | 1515, 1587, |
| | | | 795, 867 | 1083, 1155 | 1371, 1443 | 1659, 1731 |
| SP-IgE_P2_VP8*(41-223) | RVA/F01322/P[6] | 112 | 652, 724, | 940, 1012, | 1228, 1300, | 1516, 1588, |
| | | | 796, 868 | 1084, 1156 | 1372, 1444 | 1660, 1732 |
| SP-IgE_P2_VP8*(41-223) | RVA/1076/P[6] | 113 | 653, 725, | 941, 1013, | 1229, 1301, | 1517, 1589, |
| | | | 797, 869 | 1085, 1157 | 1373, 1445 | 1661, 1733 |
| SP-IgE_P2_VP8*(41-223) | RVA/BE1128/P[8] | 114 | 654, 726, | 942, 1014, | 1230, 1302, | 1518, 1590, |
| | | | 798, 870 | 1086, 1158 | 1374, 1446 | 1662, 1734 |
| SP-IgE_P2_VP8*(41-223) | RVA/Wa- | 115 | 655, 727, | 943, 1015, | 1231, 1303, | 1519, 1591, |
| | VirWa/P[8] | | 799, 871 | 1087, 1159 | 1375, 1447 | 1663, 1735 |
| SP-IgE_P2_VP8*(41-223) | RVA/Wa/P[8] | 116 | 656, 728, | 944, 1016, | 1232, 1304, | 1520, 1592, |
| | | | 800, 872 | 1088, 1160 | 1376, 1448 | 1664, 1736 |
| SP-IgE_P2_VP8*(41-223) | RVA/Wa/P[8] | 117 | 657, 729, | 945, 1017, | 1233, 1305, | 1521, 1593, |
| | | | 801, 873 | 1089, 1161 | 1377, 1449 | 1665, 1737 |
| P2_VP8*(64-223) | RVA/BE1058/P[4] | 1899 | 1907 | 1913 | 1919 | 1925 |
| P2_VP8*(64-223) | RVA/F01322/P[6] | 1900 | 1908 | 1914 | 1920 | 1926 |

[0364] Further suitable amino acid sequences and coding RNA/mRNA sequences of the invention are provided in Table X4. Therein, each row represents a specific suitable Rotavirus VP8* construct of the invention (compare with Table 1 and Table 3, columns A and B as reference), wherein the description of the Rotavirus VP8* construct is indicated in column A, column B of Table X4 provides a description of the Rotavirus of which the respective VP8A is derived from, the SEQ ID NOs of the amino acid sequence of the respective Rotavirus VP8 construct is provided in column F. The corresponding coding RNA sequences, in particular mRNA sequences comprising UTR combinations (column C) and defined 3-ends (column D), are provided in column E. The following descriptions in column D correspond to a poly(A) sequence located (exactly) at the 3′ terminus of the coding RNA: A100, hSL-A100, + enzymatic poly(A). A64-N5-C30-hSL-N5 describes a poly(A) sequence which is not located (exactly at the 3′ terminus of the coding RNA.

TABLE X4
Coding RNA, e.g. mRNA, encoding Rotavirus VPS* antigen constructs and others

| | | | C | | | |
|---|---|---|---|---|---|---|
| | | | 5′-UTR/ | | E | F |
| RNA | A | B | 3′-UTR; | D | SEQ ID | SEQ ID |
| ID | Construct | Organism | UTR Design | 3′-end | NO: RNA | NO: PRT |
| R8131 | P2_VP8*(65-223) (opt1) | RVA/BE1128/ | HSD17B4/ | A100 | 1862, 591 | 4, 51 |
| | | P[8] | PSMB3; a-1 | | | |
| R8580 | P2_VP8*(65-223) (opt1) | RVA/BE1128/ | HSD17B4/ | A100 | 1862, 591 | 4, 51 |
| | | P[8] | PSMB3; a-1 | | | |
| R8581 | P2_VP8*(65-223) (opt1) | RVA/BE1128/ | HSD17B4/ | A100 | 1862, 591 | 4, 51 |
| | | P[8] | PSMB3; a-1 | | | |
| R8575 | P2_VP8*(65-223) (opt1) | RVA/BE1128/ | HSD17B4/ | hSL-A100 | 1863, 1167 | 4, 51 |
| | | P[8] | PSMB3; a-1 | | | |
| R8576 | P2_VP8*(65-223) (opt1) | RVA/BE1128/ | HSD17B4/ | hSL-A100 | 1863, 1167 | 4, 51 |
| | | P[8] | PSMB3; a-1 | | | |
| R8628 | P2_VP8*(65-223) (opt1) | RVA/BE1128/ | HSD17B4/ | hSL-A100 | 1863, 1167 | 4, 51 |
| | | P[8] | PSMB3; a-1 | | | |
| R8044 | P2_VP8*(65-223) (opt1) | RVA/BE1128/ | HSD17B4/ | A64-N5-C30-hSL-N5 | 1864 | 4, 51 |
| | | P[8] | PSMB3; a-1 | | | |
| R8134 | P2_VP8*(65-223) (opt1) | RVA/BE1128/ | HSD17B4/ | A64-N5-C30-hSL-N5 + | 1864 | 4, 51 |
| | | P[8] | PSMB3; a-1 | enzymatic poly(A) | | |
| R5470 | P2_VP8*(65-223) (opt1) | RVA/BE1128/ | RPL32/ | A64-N5-C30-hSL-N5 | 1865 | 4, 51 |
| | | P[8] | ALB7; i-2 | | | |
| R5471 | P2_VP8*(65-223) (opt1) | RVA/BE1128/ | RPL32/ | A64-N5-C30-hSL-N5 | 1865 | 4, 51 |
| | | P[8] | ALB7; i-2 | | | |
| R7877 | P2_VP8*(65-223) (opt1) | RVA/BE1128/ | RPL32/ | A64-N5-C30-hSL-N5 | 1865 | 4, 51 |
| | | P[8] | ALB7; i-2 | | | |
| R7967 | P2_VP8*(65-223) (opt1) | RVA/BE1128/ | RPL32/ | A64-N5-C30-hSL-N5 | 1865 | 4, 51 |
| | | P[8] | ALB7; i-2 | | | |
| R8045 | P2_VP8*(65-223) (opt1) | RVA/BE1128/ | RPL32/ | A64-N5-C30-hSL-N5 | 1865 | 4, 51 |
| | | P[8] | ALB7; i-2 | | | |
| R8135 | P2_VP8*(65-223) (opt1) | RVA/BE1128/ | RPL32/ | A64-N5-C30-hSL-N5 | 1865 | 4, 51 |
| | | P[8] | ALB7; i-2 | | | |
| R8046 | P2_VP8*(65-223) (opt1) | RVA/BE1128/ | RPL32/ | A64-N5-C30-hSL-N5 + | 1865 | 4, 51 |
| | | P[8] | ALB7; i-2 | enzymatic poly(A) | | |
| R8133 | P2_VP8*(65-223) (opt3) | RVA/BE1128/ | HSD17B4/ | A100 | 1866 | 4, 51 |
| | | P[8] | PSMB3; a-1 | | | |
| R8629 | P2_VP8*(65-223) (opt3) | RVA/BE1128/ | HSD17B4/ | KSL-A100 | 1867 | 4, 51 |
| | | P[8] | PSMB3; a-1 | | | |
| R8049 | P2_VP8*(65-223) (opt3) | RVA/BE1128/ | HSD17B4/ | A64-N5-C30-hSL-N5 | 1868 | 4, 51 |
| | | P[8] | PSMB3; a-1 | | | |
| R8136 | P2_VP8*(65-223) (opt3) | RVA/BE1128/ | HSD17B4/ | A64-N5-C30-hSL-N5 + | 1868 | 4, 51 |
| | | P[8] | PSMB3; a-1 | enzymatic poly(A) | | |
| R7043 | P2_VP8*(65-223) (opt3) | RVA/BE1128/ | 3′-UTR | A64-N5-C30-hSL-N5 | 1869 | 4, 51 |
| | | P[8] | muag; i-3 | | | |
| R7411 | P2_VP8*(65-223) (opt3) | RVA/BE1128/ | 3-UTR | A64-N5-C30-hSL-N5 + | 1869 | 4, 51 |
| | | P[8] | muag; i-3 | enzymatic poly(A) | | |
| R8137 | P2_VP8*(65-223) (opt3) | RVA/BE1128/ | 3′-UTR | A64-N5-C30-hSL-N5 | 1869 | 4, 51 |
| | | P[8] | muag; i-3 | | | |
| R8047 | P2_VP8*(65-223) (opt3) | RVA/BE1128/ | RPL32/ | A64-N5-C30-hSL-N5 | 1870 | 4, 51 |
| | | P[8] | ALB7; i-2 | | | |
| R5472 | P2_VP8*(41-223) (opt1) | RVA/BE1128/ | RPL32/ | A64-N5-C30-hSL-N5 | 1871 | 60 |
| | | P[8] | ALB7; i-2 | | | |
| R5473 | P2_VP8*(41-223) (opt1) | RVA/BE1128/ | RPL32/ | A64-N5-C30-hSL-N5 | 1871 | 60 |
| | | P[8] | ALB7; i-2 | | | |
| R8582 | P2_VP8*(65- | RVA/BE1128/ | HSD17B4/ | A100 | 1872, 609 | 69 |
| | 223)_Ferritin (opt1) | P[8] | PSMB3; a-1 | | | |
| R8577 | P2_VP8*(65- | RVA/BE1128/ | HSD17B4/ | hSL-A100 | 1873, 1185 | 69 |
| | 223)_Ferritin (opt1) | P[8] | PSMB3; a-1 | | | |
| R6326 | P2_VP8*(65- | RVA/BE1128/ | RPL32/ | A64-N5-C30-hSL-N5 | 1874 | 69 |
| | 223)_Ferritin (opt1) | P[8] | ALB7; i-2 | | | |
| R6327 | P2_VP8*(65- | RVA/BE1128/ | RPL32/ | A64-N5-C30-hSL-N5 | 1874 | 69 |
| | 223)_Ferritin (opt1) | P[8] | ALB7; i-2 | | | |
| R8583 | LumSynt_P2_VP8*(41- | RVA/BE1128/ | HSD17B4/ | A100 | 1875, 636 | 1, 96 |
| | 223) (opt1) | P[8] | PSMB3; a-1 | | | |
| R8578 | LumSynt_P2_VP8*(41- | RVA/BE1128/ | HSD17B4/ | hSL-A100 | 1876, 1212 | 1, 96 |
| | 223) (opt1) | P[8] | PSMB3; a-1 | | | |
| R6328 | LumSynt_P2_VP8*(41- | RVA/BE1128/ | RPL32/ | A64-N5-C30-hSL-N5 | 1877 | 1, 96 |
| | 223) (opt1) | P[8] | ALB7; i-2 | | | |
| R6329 | LumSynt_P2_VP8*(41- | RVA/BE1128/ | RPL32/ | A64-N5-C30-hSL-N5 | 1877 | 1, 96 |
| | 223) (opt1) | P[8] | ALB7; i-2 | | | |
| R8584 | SP-IgE_P2_VP8*(41- | RVA/BE1128/ | HSD17B4/ | A100 | 1878, 654 | 114 |
| | 223) (opt1) | P[8] | PSMB3; a-1 | | | |
| R8579 | SP-IgE_P2_VP8*(41- | RVA/BE1128/ | HSD17B4/ | hSL-A100 | 1879, 1230 | 114 |
| | 223) (opt1) | P[8] | PSMB3; a-1 | | | |
| R5488 | SP-IgE_P2_VP8*(41- | RVA/BE1128/ | RPL32/ | A64-N5-C30-hSL-N5 | 1880 | 114 |
| | 223) (opt1) | P[8] | ALB7; i-2 | | | |
| R5489 | SP-IgE_P2_VP8*(41- | RVA/BE1128/ | RPL32/ | A64-N5-C30-hSL-N5 | 1880 | 114 |
| | 223) (opt1) | P[8] | ALB7; i-2 | | | |
| R6322 | SP-IgE_P2_VP8*(41- | RVA/BE1128/ | RPL32/ | A64-N5-C30-hSL-N5 | 1881 | |
| | 223)_Ferritin (opt1) | P[8] | ALB7; i-2 | | | |
| R6323 | SP-IgE_P2_VP8*(41- | RVA/BE1128/ | RPL32/ | A64-N5-C30-hSL-N5 | 1881 | |
| | 223)_Ferritin (opt1) | P[8] | ALB7; i-2 | | | |
| R6324 | SP-IgE_P2_VP8*(41- | RVA/BE1128/ | RPL32/ | A64-N5-C30-KSL-N5 | 1882 | |
| | 223)_TM domain-HA | P[8] | ALB7; i-2 | | | |
| | (opt1) | | | | | |
| R6325 | SP-IgE_P2_VP8*(41- | RVA/BE1128/ | RPL32/ | A64-N5-C30-KSL-N5 | 1882 | |
| | 223)_TM domain-HA | P[8] | ALB7; i-2 | | | |
| | (opt1) | | | | | |
| R2569 | luciferase_PpLuc (opt1) | Photinus | 3′-UTR | A64-N5-C30-hSL-N5 | 1883 | |
| | | pyralis | muag; i-3 | | | |
| R4865 | capsid_protein (opt1) | NOV/Hu/GII.4/ | RPL32/ | A64-N5-C30-hSL-N5 | 1884 | |
| | | 031693/USA/2003 | ALB7; i-2 | | | |
| R4509 | P2_VP8*(65-223) (opt1) | RVA/Wa- | RPL32/ | A64-N5-C30-hSL-N5 | 1885 | 52 |
| | | VirWa/P[8] | ALB7; i-2 | | | |
| R4510 | P2_VP8*(65-223) (opt1) | RVA/Wa- | RPL32/ | A64-N5-C30-hSL-N5 | 1885 | 52 |
| | | VirWa/P[8] | ALB7; i-2 | | | |
| R3705 | VP8* (opt1) | RVA/BE1058/ | RPL32/ | A64-N5-C30-hSL-N5 | 1886 | 9, 19 |
| | | P[4] | ALB7; i-2 | | | |
| R3706 | VP8* (opt1) | RVA/BE1058/ | RPL32/ | A64-N5-C30-hSL-N5 | 1886 | 9, 19 |
| | | P[4] | ALB7; i-2 | | | |
| R3715 | VP8* (opt1) | RVA/F01322/ | RPL32/ | A64-N5-C30-hSL-N5 | 1887 | 8, 22 |
| | | P[6] | ALB7; i-2 | | | |
| R3718 | VP8* (opt1) | RVA/F01322/ | RPL32/ | A64-N5-C30-hSL-N5 | 1887 | 8, 22 |
| | | P[6] | ALB7; i-2 | | | |
| R3685 | VP8* (opt1) | RVA/BE1128/ | RPL32/ | A64-N5-C30-hSL-N5 | 1888 | 7, 24 |
| | | P[8] | ALB7; i-2 | | | |
| R3686 | VP8* (opt1) | RVA/BE1128/ | RPL32/ | A64-N5-C30-hSL-N5 | 1888 | 7, 24 |
| | | P[8] | ALB7; i-2 | | | |
| R6937 | VP4 (opt1) | RVA/Wa- | 3-UTR | A64-N5-C30-hSL-N5 | 1889 | 16 |
| | | VirWa/P[8] | muag; i-3 | | | |
| R6938 | VP4 (opt1) | RVA/Wa- | 3-UTR | A64-N5-C30-hSL-N5 | 1889 | 16 |
| | | VirWa/P[8] | muag; i-3 | | | |
| R5436 | HsPLAT_VP8*(21- | RVA/F01322/ | RPL32/ | A64-N5-C30-hSL-N5 | 1890 | |
| | 240, N32Q, N56Q, N97Q, | P[6] | ALB7; i-2 | | | |
| | N111Q, N114Q, N132Q, | | | | | |
| | N171Q, N182Q) (opt1) | | | | | |
| R5597 | HsPLAT_VP8*(21- | RVA/F01322/ | RPL32/ | A64-N5-C30-hSL-N5 | 1890 | |
| | 240, N32Q, N56Q, N97Q, | P[6] | ALB7; i-2 | | | |
| | N111Q, N114Q, N132Q, | | | | | |
| | N171Q, N182Q) (opt1) | | | | | |
| R5480 | HsALB_VP8*(2-230) | RVA/BE1128/ | RPL32/ | A64-N5-C30-hSL-N5 | 1891 | |
| | (opt1) | P[8] | ALB7; i-2 | | | |
| R5481 | HsALB_VP8*(2-230) | RVA/BE1128/ | RPL32/ | A64-N5-C30-hSL-N5 | 1891 | |
| | (opt1) | P[8] | ALB7; i-2 | | | |
| R5482 | HsALB_VP8*(11-223) | RVA/BE1128/ | RPL32/ | A64-N5-C30-hSL-N5 | 1892 | |
| | (opt1) | P[8] | ALB7; i-2 | | | |
| R5483 | HsALB_VP8*(11-223) | RVA/BE1128/ | RPL32/ | A64-N5-C30-hSL-N5 | 1892 | |
| | (opt1) | P[8] | ALB7; i-2 | | | |
| R5484 | HsALB_VP8*(41-223) | RVA/BE1128/ | RPL32/ | A64-N5-C30-hSL-N5 | 1893 | |
| | (opt1) | P[8] | ALB7; i-2 | | | |
| R5485 | HsALB_VP8*(41-223) | RVA/BE1128/ | RPL32/ | A64-N5-C30-hSL-N5 | 1893 | |
| | (opt1) | P[8] | ALB7; i-2 | | | |
| R5486 | HsALB_P2_VP8*(41- | RVA/BE1128/ | RPL32/ | A64-N5-C30-hSL-N5 | 1894 | |
| | 223) (opt1) | P[8] | ALB7; i-2 | | | |
| R5487 | HsALB_P2_VP8*(41- | RVA/BE1128/ | RPL32/ | A64-N5-C30-hSL-N5 | 1894 | |
| | 223) (opt1) | P[8] | ALB7; i-2 | | | |
| R5433 | HsPLAT_VP8*(41-223) | RVA/F01322/ | RPL32/ | A64-N5-C30-hSL-N5 | 1895 | |
| | (opt1) | P[6] | ALB7; i-2 | | | |
| R5594 | HsPLAT_VP8*(41-223) | RVA/F01322/ | RPL32/ | A64-N5-C30-hSL-N5 | 1895 | |
| | (opt1) | P[6] | ALB7; i-2 | | | |
| R5434 | HsPLAT_P2_VP8*(41- | RVA/F01322/ | RPL32/ | A64-N5-C30-hSL-N5 | 1896 | |
| | 223) (opt1) | P[6] | ALB7; i-2 | | | |
| R5595 | HsPLAT_P2_VP8*(41- | RVA/F01322/ | RPL32/ | A64-N5-C30-hSL-N5 | 1896 | |
| | 223) (opt1) | P[6] | ALB7; i-2 | | | |
| R5435 | HsPLAT_VP8*(2-230) | RVA/F01322/ | RPL32/ | A64-N5-C30-hSL-N5 | 1897 | |
| | (opt1) | P[6] | ALB7; i-2 | | | |
| R5596 | HsPLAT_VP8*(2-230) | RVA/F01322/ | RPL32/ | A64-N5-C30-hSL-N5 | 1897 | |
| | (opt1) | P[6] | ALB7; i-2 | | | |
| R8138 | P2_VP8*(65-223) (opt1) | RVA/BE1128/ | RPL32/ | A100 | 1898 | 4, 51 |
| | | P[8] | ALB7; i-2 | | | |
| R9247 | P2_VP8*(64-223) (opt1) | RVA/BE1058/ | HSD17B4/ | hSL-A100 | 1919 | 1899 |
| | | P[4] | PSMB3; a-1 | | | |
| R9246 | P2_VP8*(64-223) (opt1) | RVA/F01322/ | HSD17B4/ | hSL-A100 | 1920 | 1900 |
| | | P[6] | PSMB3; a-1 | | | |
| R9078 | P2_VP8*(65-223) (opt1) | RVA/BE1058/ | HSD17B4/ | hSL-A100 | 1921 | 6, 46 |
| | | P[4] | PSMB3; a-1 | | | |
| R9077 | P2_VP8*(65-223) (opt1) | RVA/F01322/ | HSD17B4/ | hSL-A100 | 1922 | 5, 49 |
| | | P[6] | PSMB3; a-1 | | | |
| R9092 | LumSynt_P2_VP8*(41- | RVA/BE1058/ | HSD17B4/ | hSL-A100 | 1923 | 3, 91 |
| | 223) (opt1) | P[4] | PSMB3; a-1 | | | |
| R9091 | LumSynt_P2_VP8*(41- | RVA/F01322/ | HSD17B4/ | hSL-A100 | 1924 | 2, 94 |
| | 223) (opt1) | P[6] | PSMB3; a-1 | | | |

[0365] In preferred embodiments, the coding RNA, preferably the mRNA, comprises or consists of an RNA sequence which is identical or at least 70%, 80%, 85%, 86%, 87%, 88%, 89%, 90%, 91%, 92%, 93%, 94%, 95%, 96%, 97%, 98%, or 99% identical to a nucleic acid sequence selected from the group consisting of SEQ ID NOs: 586-1737, 1862-1882, 1885-1898, 1907-1930 or a fragment or variant of any of these sequences. Further information is provided under <223> identifier of the respective SEQ ID NO in the sequence listing.

[0366] In particularly preferred embodiments, the coding RNA, preferably the mRNA, comprises or consists of an RNA sequence which is identical or at least 70%, 80%, 85%, 86%, 87%, 88%, 89%, 90%, 91%, 92%, 93%, 94%, 95%, 96%, 97%, 98%, or 99% identical to a nucleic acid sequence selected from the group consisting of SEQ ID NOs: 586-594, 604-612, 631-639, 649-666, 676-684, 703-711, 721-738, 748-756, 775-783, 793-810, 820-828, 847-855, 865-882, 892-900, 919-927, 937-954, 964-972, 991-999, 1009-1026, 1036-1044, 1063-1071, 1081-1098, 1108-1116, 1135-1143, 1153-1170, 1180-1188, 1207-1215, 1225-1242, 1252-1260, 1279-1287, 1297-1314, 1324-1332, 1351-1359, 1369-1386, 1396-1404, 1423-1431, 1441-1458, 1468-1476, 1495-1503, 1513-1530, 1540-1548, 1567-1575, 1585-1602, 1612-1620, 1639-1647, 1657-1674, 1684-1692, 1711-1719, 1729-1737, 1862-1870, 1872-1877, 1885, 1898, 1907-1930 or a fragment or variant of any of these sequences. Further information is provided under <223> identifier of the respective SEQ ID NO in the sequence listing.

[0367] It is further preferred that the coding RNA, preferably the mRNA, comprises or consists of an RNA sequence which is identical or at least 70%, 80%, 85%, 86%, 87%, 88%, 89%, 90%, 91%, 92%, 93%, 94%, 95%, 96%, 97%, 98%, or 99% identical to a nucleic acid sequence selected from the group consisting of SEQ ID NOs: 586-594, 604-612, 631-639, 649-666, 676-684, 703-711, 721-738, 748-756, 775-783, 793-810, 820-828, 847-855, 865-882, 892-900, 919-927, 937-954, 964-972, 991-999, 1009-1026, 1036-1044, 1063-1071, 1081-1098, 1108-1116, 1135-1143, 1153-1170, 1180-1188, 1207-1215, 1225-1242, 1252-1260, 1279-1287, 1297-1314, 1324-1332, 1351-1359, 1369-1386, 1396-1404, 1423-1431, 1441-1458, 1468-1476, 1495-1503, 1513-1530, 1540-1548, 1567-1575, 1585-1602, 1612-1620, 1639-1647, 1657-1674, 1684-1692, 1711-1719, 1729-1737, 1862-1870, 1872-1877, 1885, 1898, 1907-1930, wherein said RNA sequences comprise a cap1 structure.

[0368] It is particularly preferred that the coding RNA, preferably the mRNA, comprises or consists of an RNA sequence which is identical or at least 70%, 80%, 85%, 86%, 87%, 88%, 89%, 90%, 91%, 92%, 93%, 94%, 95%, 96%, 97%, 98%, or 99% identical to a nucleic acid sequence selected from the group consisting of SEQ ID NOs: 586-594, 604-612, 631-639, 649-666, 676-684, 703-711, 721-738, 748-756, 775-783, 793-810, 820-828, 847-855, 865-882, 892-900, 919-927, 937-954, 964-972, 991-999, 1009-1026, 1036-1044, 1063-1071, 1081-1098, 1108-1116, 1135-1143, 1153-1170, 1180-1188, 1207-1215, 1225-1242, 1252-1260, 1279-1287, 1297-1314, 1324-1332, 1351-1359, 1369-1386, 1396-1404, 1423-1431, 1441-1458, 1468-1476, 1495-1503, 1513-1530, 1540-1548, 1567-1575, 1585-1602, 1612-1620, 1639-1647, 1657-1674, 1684-1692, 1711-1719, 1729-1737, 1862, 1863, 1866, 1867, 1872, 1873, 1875, 1876, 1898, 1907-1930, wherein said RNA sequences comprise a cap1 structure and wherein said RNA sequences comprise a 3′-terminal poly(A) sequence obtained from a DNA template during RNA in vitro transcription.

[0369] It is further preferred that the coding RNA, preferably the mRNA, comprises or consists of an RNA sequence which is identical or at least 70%, 80%, 85%, 86%, 87%, 88%, 89%, 90%, 91%, 92%, 93%, 94%, 95%, 96%, 97%, 98%, or 99% identical to a nucleic acid sequence selected from the group consisting of SEQ ID NOs: 586-594, 604-612, 631-639, 649-666, 676-684, 703-711, 721-738, 748-756, 775-783, 793-810, 820-828, 847-855, 865-882, 892-900, 919-927, 937-954, 964-972, 991-999, 1009-1026, 1036-1044, 1063-1071, 1081-1098, 1108-1116, 1135-1143, 1153-1170, 1180-1188, 1207-1215, 1225-1242, 1252-1260, 1279-1287, 1297-1314, 1324-1332, 1351-1359, 1369-1386, 1396-1404, 1423-1431, 1441-1458, 1468-1476, 1495-1503, 1513-1530, 1540-1548, 1567-1575, 1585-1602, 1612-1620, 1639-1647, 1657-1674, 1684-1692, 1711-1719, 1729-1737, 1862, 1863, 1866, 1867, 1872, 1873, 1875, 1876, 1898, 1907-1930, wherein said RNA sequences comprise a cap1 structure, wherein said RNA sequences comprise a 3-terminal poly(A) sequence obtained by enzymatic polyadenylation, wherein the majority of RNA molecules comprise about 100 (+/−20) to about 500 (+/−50), preferably about 250 (+/−20) adenosine nucleotides.

[0370] It is further preferred that the coding RNA, preferably the mRNA, comprises or consists of an RNA sequence which is identical or at least 70%, 80%, 85%, 86%, 87%, 88%, 89%, 90%, 91%, 92%, 93%, 94%, 95%, 96%, 97%, 98%, or 99% identical to a nucleic acid sequence selected from the group consisting of SEQ ID NOs: 586-594, 604-612, 631-639, 649-666, 676-684, 703-711, 721-738, 748-756, 775-783, 793-810, 820-828, 847-855, 865-882, 892-900, 919-927, 937-954, 964-972, 991-999, 1009-1026, 1036-1044, 1063-1071, 1081-1098, 1108-1116, 1135-1143, 1153-1170, 1180-1188, 1207-1215, 1225-1242, 1252-1260, 1279-1287, 1297-1314, 1324-1332, 1351-1359, 1369-1386, 1396-1404, 1423-1431, 1441-1458, 1468-1476, 1495-1503, 1513-1530, 1540-1548, 1567-1575, 1585-1602, 1612-1620, 1639-1647, 1657-1674, 1684-1692, 1711-1719, 1729-1737, 1862-1870, 1872-1877, 1885, 1898, 1907-1930, wherein said RNA sequences comprise a cap1 structure, and, wherein at least one, preferably all uracil nucleotides in said RNA sequences are replaced by pseudouridine (ψ) nucleotides and/or N1-methylpseudouridine (m1ψ) nucleotides.

[0371] It is further preferred that the coding RNA, preferably the mRNA, comprises or consists of an RNA sequence which is identical or at least 70%, 80%, 85%, 86%, 87%, 88%, 89%, 90%, 91%, 92%, 93%, 94%, 95%, 96%, 97%, 98%, or 99% identical to a nucleic acid sequence selected from the group consisting of SEQ ID NOs: 586-594, 604-612, 631-639, 649-666, 676-684, 703-711, 721-738, 748-756, 775-783, 793-810, 820-828, 847-855, 865-882, 892-900, 919-927, 937-954, 964-972, 991-999, 1009-1026, 1036-1044, 1063-1071, 1081-1098, 1108-1116, 1135-1143, 1153-1170, 1180-1188, 1207-1215, 1225-1242, 1252-1260, 1279-1287, 1297-1314, 1324-1332, 1351-1359, 1369-1386, 1396-1404, 1423-1431, 1441-1458, 1468-1476, 1495-1503, 1513-1530, 1540-1548, 1567-1575, 1585-1602, 1612-1620, 1639-1647, 1657-1674, 1684-1692, 1711-1719, 1729-1737, 1862-1870, 1872-1877, 1885, 1898, 1907-1930, wherein said RNA sequences comprise a Cap1 structure, and wherein at least one, preferably all uracil nucleotides in said RNA sequences are replaced by pseudouridine (ψ) nucleotides and/or N1-methylpseudouridine (m1ψ) nucleotides, and, wherein said RNA sequences comprise a 3-terminal poly(A) sequence obtained from a DNA template during RNA in vitro transcription.

[0372] It is further preferred that the coding RNA, preferably the mRNA, comprises or consists of an RNA sequence which is identical or at least 70%, 80%, 85%, 86%, 87%, 88%, 89%, 90%, 91%, 92%, 93%, 94%, 95%, 96%, 97%, 98%, or 99% identical to a nucleic acid sequence selected from the group consisting of SEQ ID NOs: 586-594, 604-612, 631-639, 649-666, 676-684, 703-711, 721-738, 748-756, 775-783, 793-810, 820-828, 847-855, 865-882, 892-900, 919-927, 937-954, 964-972, 991-999, 1009-1026, 1036-1044, 1063-1071, 1081-1098, 1108-1116, 1135-1143, 1153-1170, 1180-1188, 1207-1215, 1225-1242, 1252-1260, 1279-1287, 1297-1314, 1324-1332, 1351-1359, 1369-1386, 1396-1404, 1423-1431, 1441-1458, 1468-1476, 1495-1503, 1513-1530, 1540-1548, 1567-1575, 1585-1602, 1612-1620, 1639-1647, 1657-1674, 1684-1692, 1711-1719, 1729-1737, 1862, 1863, 1866, 1867, 1872, 1873, 1875, 1876, 1898, 1907-1930, wherein said RNA sequences comprise a cap1 structure, and wherein at least one, preferably all uracil nucleotides in said RNA sequences are replaced by pseudouridine (ψ) nucleotides and/or N1-methylpseudouridine (m1ψ) nucleotides, and, wherein said RNA sequences comprise a 3-terminal poly(A) sequence obtained by enzymatic polyadenylation, wherein the majority of RNA molecules comprise about 100 (+/−20) to about 500 (+/−50), preferably about 250 (+/−20) adenosine nucleotides.

[0373] As outlined throughout the specification, additional information regarding suitable amino acid sequences or nucleic acid sequences (coding sequences, mRNA sequences) may also be derived from the sequence listing, in particular from the details provided therein under identifier <223> as explained in the following.

[0374] It has to be noted that throughout the sequence listing, information provided under numeric identifier <223> follows the same structure: “<SEQUENCE_DESCRIPTOR> from <CONSTRUCT_IDENTIFIER>”. The <SEQUENCE_DESCRIPTOR> relates to the type of sequence (e.g., “derived and/or modified protein sequence”, “derived and/or modified CDS sequence” “mRNA product design a-1 comprising derived and/or modified sequence” or “mRNA product Design i-3 comprising derived and/or modified sequence”, etc.) and whether the sequence comprises or consists of a wild type sequence (“wt”) or whether the sequence comprises or consists of a sequence-optimized sequence (e.g. “opt1”, “opt4”, “opt5”; sequence optimizations are described in further detail below). The <CONSTRUCT_IDENTIFIER> provided under numeric identifier <223> has the following structures: (“organism_construct name”, or “organism_accession number_construct name”) and is intended to help the person skilled in the art to explicitly derive suitable nucleic acid sequences (e.g., RNA, mRNA) encoding the same VP8* protein construct according to the invention.

[0375] RNA Manufacturing Methods:

[0376] The coding RNA, preferably the mRNA of the invention may be prepared using any method known in the art, including chemical synthesis such as e.g. solid phase RNA synthesis, as well as in vitro methods, such as RNA in vitro transcription reactions.

[0377] In a preferred embodiment, the coding RNA, preferably the mRNA is obtained by RNA in vitro transcription.

[0378] Accordingly, the coding RNA of the invention is preferably an in vitro transcribed RNA.

[0379] The terms “RNA in vitro transcription” or “in vitro transcription” relate to a process wherein RNA is synthesized in a cell-free system (in vitro). RNA may be obtained by DNA-dependent in vitro transcription of an appropriate DNA template, which according to the present invention is a linearized plasmid DNA template or a PCR-amplified DNA template. The promoter for controlling RNA in vitro transcription can be any promoter for any DNA-dependent RNA polymerase. Particular examples of DNA-dependent RNA polymerases are the T7, T3, SP6, or Syn5 RNA polymerases. In a preferred embodiment of the present invention the DNA template is linearized with a suitable restriction enzyme, before it is subjected to RNA in vitro transcription.

[0380] Reagents used in RNA in vitro transcription typically include: a DNA template (linearized plasmid DNA or PCR product) with a promoter sequence that has a high binding affinity for its respective RNA polymerase such as bacteriophage-encoded RNA polymerases (T7, T3, SP6, or Syn5); ribonucleotide triphosphates (NTPs) for the four bases (adenine, cytosine, guanine and uracil); optionally, a cap analogue as defined herein; optionally, further modified nucleotides as defined herein; a DNA-dependent RNA polymerase capable of binding to the promoter sequence within the DNA template (e.g. T7, T3, SP6, or Syn5 RNA polymerase); optionally, a ribonuclease (RNase) inhibitor to inactivate any potentially contaminating RNase; optionally, a pyrophosphatase to degrade pyrophosphate, which may inhibit RNA in vitro transcription; MgCl2, which supplies Mg2+ ions as a co-factor for the polymerase; a buffer (TRIS or HEPES) to maintain a suitable pH value, which can also contain antioxidants (e.g. DTT), and/or polyamines such as spermidine at optimal concentrations, e.g. a buffer system comprising TRIS-Citrate as disclosed in WO2017/109161.

[0381] In preferred embodiments, the cap1 structure of the coding RNA of the invention is formed using co-transcriptional capping using tri-nucleotide cap analogues m7G(5′)ppp(5′)(2′OMeA)pG or m7G(5′)ppp(5′)(2′OMeG)pG. A preferred cap1 analogue that may suitably be used in manufacturing the coding RNA of the invention is m7G(5′)ppp(5′)(2′OMeA)pG.

[0382] In embodiments, the nucleotide mixture used in RNA in vitro transcription may additionally comprises modified nucleotides as defined herein. In that context, preferred modified nucleotides may be selected from pseudouridine (ψ), N1-methylpseudouridine (m1ψ), 5-methylcytosine, and 5-methoxyuridine. In particular embodiments, uracil nucleotides in the nucleotide mixture are replaced (either partially or completely) by pseudouridine (ψ) and/or N1-methylpseudouridine (m1ψ) to obtain a modified coding RNA.

[0383] In preferred embodiments, the nucleotide mixture (i.e. the fraction of each nucleotide in the mixture) used for RNA in vitro transcription reactions may be optimized for the given RNA sequence, preferably as described WO2015/188933.

[0384] In embodiment where more than one different coding RNA as defined herein have to be produced, e.g. where 2, 3, 4, 5, 6, 7, 8, 9, 10 or even more different coding RNAs have to be produced (e.g. encoding different VP8* antigen constructs derived from different Rotavirus A serotypes; see second aspect), procedures as described in WO2017/109134 may be suitably be used.

[0385] In the context of RNA vaccine production, it may be required to provide GMP-grade RNA. GMP-grade RNA may be produced using a manufacturing process approved by regulatory authorities. Accordingly, in a particularly preferred embodiment, RNA production is performed under current good manufacturing practice (GMP), implementing various quality control steps on DNA and RNA level, preferably according to WO2016/180430. In preferred embodiments, the RNA of the invention is a GMP-grade RNA, particularly a GMP-grade mRNA. Accordingly, a coding RNA for a vaccine is a GMP grade RNA.

[0386] The obtained RNA products are preferably purified using PureMessenger® (CureVac, Tübingen, Germany; RP-HPLC according to WO2008/077592) and/or tangential flow filtration (as described in WO2016/193206) and/or oligo d(T) purification.

[0387] In a further preferred embodiment, the coding RNA, particularly the purified coding RNA, is lyophilized (e.g. according to WO2016/165831 or WO2011/069586) to yield a temperature stable dried coding RNA (powder) as defined herein. The RNA of the invention, particularly the purified RNA may also be dried using spray-drying or spray-freeze drying (e.g. according to WO2016/184575 or WO2016/184576) to yield a temperature stable RNA (powder) as defined herein. Accordingly, in the context of manufacturing and purifying RNA, the disclosures of WO2017/109161, WO2015/188933, WO2016/180430, WO2008/077592, WO2016/193206, WO2016/165831, WO2011/069586, WO2016/184575, and WO2016/184576 are incorporated herewith by reference.

[0388] Accordingly, in preferred embodiments, the coding RNA is a dried RNA, particularly a dried mRNA.

[0389] The term “dried RNA” as used herein has to be understood as RNA that has been lyophilized, or spray-dried, or spray-freeze dried as defined above to obtain a temperature stable dried RNA (powder).

[0390] In preferred embodiments, the coding RNA of the invention is a purified RNA, particularly purified mRNA.

[0391] The term “purified RNA” or “purified mRNA” as used herein has to be understood as RNA which has a higher purity after certain purification steps (e.g. HPLC, TFF, Oligo d(T) purification, precipitation steps) than the starting material (e.g. in vitro transcribed RNA). Typical impurities that are essentially not present in purified RNA comprise peptides or proteins (e.g. enzymes derived from DNA dependent RNA in vitro transcription, e.g. RNA polymerases, RNases, pyrophosphatase, restriction endonuclease, DNase), spermidine, BSA, abortive RNA sequences, RNA fragments (short double stranded RNA fragments, abortive sequences etc.), free nucleotides (modified nucleotides, conventional NTPs, cap analogue), template DNA fragments, buffer components (HEPES, TRIS, MgCl2) etc. Other potential impurities that may be derived from e.g. fermentation procedures comprise bacterial impurities (bioburden, bacterial DNA) or impurities derived from purification procedures (organic solvents etc.). Accordingly, it is desirable in this regard for the “degree of RNA purity” to be as close as possible to 100%. It is also desirable for the degree of RNA purity that the amount of full-length RNA transcripts is as close as possible to 100%. Accordingly “purified RNA” as used herein has a degree of purity of more than 75%, 80%, 85%, very particularly 90%, 91%, 92%, 93%, 94%, 95%, 96%, 97%, 98% and most favorably 99% or more. The degree of purity may for example be determined by an analytical HPLC, wherein the percentages provided above correspond to the ratio between the area of the peak for the target RNA and the total area of all peaks representing the by-products. Alternatively, the degree of purity may for example be determined by an analytical agarose gel electrophoresis or capillary gel electrophoresis.

[0392] It has to be understood that “dried RNA” as defined herein and “purified RNA” as defined herein or “GMP-grade RNA” as defined herein may have superior stability characteristics (in vitro, in vivo) and improved efficiency (e.g. better translatability of the mRNA in vivo) and are therefore particularly suitable for a medical purpose, e.g. a vaccine.

[0393] Following co-transcriptional capping as defined herein, and following purification as defined herein, the capping degree of the obtained coding RNA may be determined using capping assays as described in published PCT application WO2015/101416, in particular, as described in Claims 27 to 46 of published PCT application WO20151101416 can be used. Alternatively, a capping assays described in PCT/EP2018/08667 may be used.

[0394] Composition, Pharmaceutical Composition:

[0395] A second aspect relates to a composition comprising at least one coding RNA of the first aspect.

[0396] Notably, embodiments relating to the composition of the second aspect may likewise be read on and be understood as suitable embodiments of the vaccine of the third aspect. Also, embodiments relating to the vaccine of the third aspect may likewise be read on and be understood as suitable embodiments of the composition of the second aspect (comprising the RNA of the first aspect).

[0397] In preferred embodiments, said composition comprises at least one coding RNA encoding a Rotavirus antigen, preferably VP8* according to the first aspect, or an immunogenic fragment or immunogenic variant thereof, wherein said composition is to be, preferably, administered intramuscularly or intradermal.

[0398] Preferably, intramuscular or intradermal administration of said composition results in expression of the encoded VP8* antigen construct in a subject. Preferably, the composition of the second aspect is suitable for a vaccine, in particular, suitable for a Rotavirus vaccine.

[0399] In the context of the invention, a “composition” refers to any type of composition in which the specified ingredients (e.g. RNA encoding VP8* e.g. in association with a polymeric carrier or LNP), may be incorporated, optionally along with any further constituents, usually with at least one pharmaceutically acceptable carrier or excipient. The composition may be a dry composition such as a powder or granules, or a solid unit such as a lyophilized form. Alternatively, the composition may be in liquid form, and each constituent may be independently incorporated in dissolved or dispersed (e.g. suspended or emulsified) form.

[0400] In a preferred embodiment of the second aspect, the composition comprises at least one coding RNA of the first aspect and, optionally, at least one pharmaceutically acceptable carrier or excipient.

[0401] In particularly preferred embodiments of the second aspect, the composition comprises at least one coding RNA, wherein the coding RNA comprises or consists of an RNA sequence which is identical or at least 70%, 80%, 85%, 86%, 87%, 88%, 89%, 90%, 91%, 92%, 93%, 94%, 95%, 96%, 97%, 98%, or 99% identical to a nucleic acid sequence selected from the group consisting of SEQ ID NOs: 586-594, 604-612, 631-639, 649-666, 676-684, 703-711, 721-738, 748-756, 775-783, 793-810, 820-828, 847-855, 865-882, 892-900, 919-927, 937-954, 964-972, 991-999, 1009-1026, 1036-1044, 1063-1071, 1081-1098, 1108-1116, 1135-1143, 1153-1170, 1180-1188, 1207-1215, 1225-1242, 1252-1260, 1279-1287, 1297-1314, 1324-1332, 1351-1359, 1369-1386, 1396-1404, 1423-1431, 1441-1458, 1468-1476, 1495-1503, 1513-1530, 1540-1548, 1567-1575, 1585-1602, 1612-1620, 1639-1647, 1657-1674, 1684-1692, 1711-1719, 1729-1737, 1862-1870, 1872-1877, 1885, 1898, 1907-1930, and, optionally, at least one pharmaceutically acceptable carrier or excipient.

[0402] In other embodiments, the composition comprises at least one coding RNA, wherein the coding RNA comprises or consists of an RNA sequence which is identical or at least 70%, 80%, 85%, 86%, 87%, 88%, 89%, 90%, 91%, 92%, 93%, 94%, 95%, 96%, 97%, 98%, or 99% identical to a nucleic acid sequence selected from the group consisting of SEQ ID NOs: 828-3146 or 3306-3593 of WO2017/081110A1, and, optionally, at least one pharmaceutically acceptable carrier or excipient.

[0403] The term “pharmaceutically acceptable carrier” or “pharmaceutically acceptable excipient” as used herein preferably includes the liquid or non-liquid basis of the composition for administration. If the composition is provided in liquid form, the carrier may be water, e.g. pyrogen-free water; isotonic saline or buffered (aqueous) solutions, e.g. phosphate, citrate etc. buffered solutions. Water or preferably a buffer, more preferably an aqueous buffer, may be used, containing a sodium salt, preferably at least 50 mM of a sodium salt, a calcium salt, preferably at least 0.01 mM of a calcium salt, and optionally a potassium salt, preferably at least 3 mM of a potassium salt. According to preferred embodiments, the sodium, calcium and, optionally, potassium salts may occur in the form of their halogenides, e.g. chlorides, iodides, or bromides, in the form of their hydroxides, carbonates, hydrogen carbonates, or sulfates, etc. Examples of sodium salts include NaCl, NaI, NaBr, Na₂CO₃, NaHCO₃, Na₂SO₄, examples of the optional potassium salts include KCl, KI, KBr, K₂CO₃, KHCO₃, K₂SO₄, and examples of calcium salts include CaCl₂, CaI₂, CaBr₂, CaCO₃, CaSO₄, Ca(OH)₂.

[0404] Furthermore, organic anions of the aforementioned cations may be in the buffer. Accordingly, in embodiments, the RNA composition of the invention may comprise pharmaceutically acceptable carriers or excipients using one or more pharmaceutically acceptable carriers or excipients to e.g. increase stability, increase cell transfection, permit the sustained or delayed, increase the translation of encoded VP8* protein construct in vivo, and/or alter the release profile of encoded VP8* protein in vivo. In addition to traditional excipients such as any and all solvents, dispersion media, diluents, or other liquid vehicles, dispersion or suspension aids, surface active agents, isotonic agents, thickening or emulsifying agents, preservatives, excipients of the present invention can include, without limitation, lipidoids, liposomes, lipid nanoparticles, polymers, lipoplexes, core-shell nanoparticles, peptides, proteins, cells transfected with polynucleotides, hyaluronidase, nanoparticle mimics and combinations thereof. In embodiments, one or more compatible solid or liquid fillers or diluents or encapsulating compounds may be used as well, which are suitable for administration to a subject. The term “compatible” as used herein means that the constituents of the composition are capable of being mixed with the at least one RNA and, optionally, a plurality of RNAs of the composition, in such a manner that no interaction occurs, which would substantially reduce the biological activity or the pharmaceutical effectiveness of the composition under typical use conditions (e.g., intramuscular or intradermal administration). Pharmaceutically acceptable carriers or excipients must have sufficiently high purity and sufficiently low toxicity to make them suitable for administration to a subject to be treated. Compounds which may be used as pharmaceutically acceptable carriers or excipients may be sugars, such as, for example, lactose, glucose, trehalose, mannose, and sucrose; starches, such as, for example, corn starch or potato starch; dextrose; cellulose and its derivatives, such as, for example, sodium carboxymethylcellulose, ethylcellulose, cellulose acetate; powdered tragacanth; malt; gelatin; tallow; solid glidants, such as, for example, stearic acid, magnesium stearate; calcium sulfate; vegetable oils, such as, for example, groundnut oil, cottonseed oil, sesame oil, olive oil, corn oil and oil from theobroma; polyols, such as, for example, polypropylene glycol, glycerol, sorbitol, mannitol and polyethylene glycol; alginic acid.

[0405] The at least one pharmaceutically acceptable carrier or excipient of the composition may preferably be selected to be suitable for intramuscular or intradermal delivery/administration of said composition. Accordingly, the composition is preferably a pharmaceutical composition, suitably a composition for intramuscular administration.

[0406] Subjects to which administration of the compositions, preferably the pharmaceutical composition, is contemplated include, but are not limited to, humans and/or other primates; mammals, including commercially relevant mammals such as cattle, pigs, horses, sheep, cats, dogs, mice, and/or rats; and/or birds, including commercially relevant birds such as poultry, chickens, ducks, geese, and/or turkeys.

[0407] Pharmaceutical compositions of the present invention may suitably be sterile and/or pyrogen-free.

[0408] In embodiments, the composition as defined herein may comprise a plurality or at least more than one of the coding RNA species as defined in the context of the first aspect of the invention. Preferably, the composition as defined herein may comprise 2, 3, 4, 5, 6, 7, 8, 9, or 10 different coding RNAs each defined in the context of the first aspect.

[0409] In embodiment, the composition may comprise at least 2, 3, 4, 5, 6, 7, 8, 9, 10 or even more different coding RNA species as defined in the context of the first aspect, each encoding at least one antigenic peptide or protein derived from the same Rotavirus, or a fragment or variant thereof. Particularly, said (genetically) same Rotavirus expresses (essentially) the same repertoire of proteins or peptides, wherein all proteins or peptides have (essentially) the same amino acid sequence. Particularly, said (genetically) same Rotavirus expresses essentially the same proteins, peptides or polyproteins, wherein these protein, peptide or polyproteins preferably do not differ in their amino acid sequence(s).

[0410] In embodiments, the composition comprises at least 2, 3, 4, 5, 6, 7, 8, 9, 10 or even more different coding RNA species as defined in the context of the first aspect, each encoding at least one peptide or protein derived from a genetically different Rotavirus (e.g. a different Rotavirus A serotype), or a fragment or variant thereof. The terms “different” or “different Rotavirus” as used throughout the present specification have to be understood as the difference between at least two respective Rotaviruses (e.g. a different Rotavirus A serotype), wherein the difference is manifested on the genome of the respective different Rotaviruses. Particularly, said (genetically) different Rotaviruses may express at least one different protein, peptide or polyprotein, wherein the at least one different protein, peptide or polyprotein differs in at least one amino acid.

[0411] In embodiments, the composition comprises at least 2, 3, 4, 5, 6, 7, 8, 9, 10 or even more coding RNA species each encoding a different Rotavirus antigen (constructs), wherein each of the different Rotavirus antigen (constructs) may be selected from VP1, VP2, VP3, VP4, VP5*, VP6, VP7, VP8*, NSP1, NSP2, NSP3, NSP4, NSP5 and NSP6, or combinations, or immunogenic fragments, or immunogenic variants of any of these.

[0412] In preferred embodiments, the composition comprises at least 2, 3, 4, 5, 6, 7, 8, 9, 10 or even more coding RNA construct species each encoding a different VP8* Rotavirus antigen (constructs) as defined in the first aspect, preferably wherein each of the coding RNA constructs are selected from SEQ ID NOs: 586-1737, 1862-1882, 1885-1898, 1907-1930.

[0413] In particularly preferred embodiments, the composition comprises at least 2, 3, 4, 5, 6, 7, 8, 9, 10 or even more coding RNA construct species each encoding the same VP8* Rotavirus antigen (constructs) derived from a genetically different Rotavirus (e.g. a different Rotavirus A serotype), or a fragment or variant thereof as defined in the first aspect, preferably wherein each of the coding RNA constructs are selected from SEQ ID NOs: 586-1737, 1862-1882, 1885-1898, 1907-1930.

[0414] In preferred embodiments, the composition of the second aspect comprises
[0415] (i) at least one coding RNA encoding at least one antigenic protein that is or is derived from VP8* of a Rotavirus A from a P[4] serotype as specified herein; and
[0416] (ii) at least one coding RNA encoding at least one antigenic protein that is or is derived from VP8* of a Rotavirus A from a P[6] serotype as specified herein; and
[0417] (iii) at least one coding RNA encoding at least one antigenic protein that is or is derived from VP8* of a Rotavirus A from a P[8] serotype as specified herein.

[0418] In particularly preferred embodiments, the composition of the second aspect comprises
[0419] (i) at least one coding RNA encoding at least one antigenic protein that is or is derived from VP8* of a Rotavirus A from a P[4] serotype as specified herein, preferably according to SEQ ID NOs: 586-588, 595-597, 604-606, 613-615, 622-624, 631-633, 640-642, 649-651, 658-660, 667-669, 676-678, 685-687, 694-696, 703-705, 712-714, 721-723, 730-732, 739-741, 748-750, 757-759, 766-768, 775-777, 784-786, 793-795, 802-804, 811-813, 820-822, 829-831, 838-840, 847-849, 856-858, 865-867, 874-876, 883-885, 892-894, 901-903, 910-912, 919-921, 928-930, 937-939, 946-948, 955-957, 964-966, 973-975, 982-984, 991-993, 1000-1002, 1009-1011, 1018-1020, 1027-1029, 1036-1038, 1045-1047, 1054-1056, 1063-1065, 1072-1074, 1081-1083, 1090-1092, 1099-1101, 1108-1110, 1117-1119, 1126-1128, 1135-1137, 1144-1146, 1153-1155, 1162-1164, 1171-1173, 1180-1182, 1189-1191, 1198-1200, 1207-1209, 1216-1218, 1225-1227, 1234-1236, 1243-1245, 1252-1254, 1261-1263, 1270-1272, 1279-1281, 1288-1290, 1297-1299, 1306-1308, 1315-1317, 1324-1326, 1333-1335, 1342-1344, 1351-1353, 1360-1362, 1369-1371, 1378-1380, 1387-1389, 1396-1398, 1405-1407, 1414-1416, 1423-1425, 1432-1434, 1441-1443, 1450-1452, 1459-1461, 1468-1470, 1477-1479, 1486-1488, 1495-1497, 1504-1506, 1513-1515, 1522-1524, 1531-1533, 1540-1542, 1549-1551, 1558-1560, 1567-1569, 1576-1578, 1585-1587, 1594-1596, 1603-1605, 1612-1614, 1621-1623, 1630-1632, 1639-1641, 1648-1650, 1657-1659, 1666-1668, 1675-1677, 1684-1686, 1693-1695, 1702-1704, 1711-1713, 1720-1722, 1729-1731, 1886, 1907, 1909, 1911, 1913, 1915, 1917, 1919, 1921, 1923, 1925, 1927, 1929 or fragments or variants thereof;
[0420] (ii) at least one coding RNA encoding at least one antigenic protein that is or is derived from VP8* of a Rotavirus A from a P[6] serotype as specified herein, preferably according to SEQ ID NOs: 589, 590, 598, 599, 607, 608, 616, 617, 625, 626, 634, 635, 643, 644, 652, 653, 661, 662, 670, 671, 679, 680, 688, 689, 697, 698, 706, 707, 715, 716, 724, 725, 733, 734, 742, 743, 751, 752, 760, 761, 769, 770, 778, 779, 787, 788, 796, 797, 805, 806, 814, 815, 823, 824, 832, 833, 841, 842, 850, 851, 859, 860, 868, 869, 877, 878, 886, 887, 895, 896, 904, 905, 913, 914, 922, 923, 931, 932, 940, 941, 949, 950, 958, 959, 967, 968, 976, 977, 985, 986, 994, 995, 1003, 1004, 1012, 1013, 1021, 1022, 1030, 1031, 1039, 1040, 1048, 1049, 1057, 1058, 1066, 1067, 1075, 1076, 1084, 1085, 1093, 1094, 1102, 1103, 1111, 1112, 1120, 1121, 1129, 1130, 1138, 1139, 1147, 1148, 1156, 1157, 1165, 1166, 1174, 1175, 1183, 1184, 1192, 1193, 1201, 1202, 1210, 1211, 1219, 1220, 1228, 1229, 1237, 1238, 1246, 1247, 1255, 1256, 1264, 1265, 1273, 1274, 1282, 1283, 1291, 1292, 1300, 1301, 1309, 1310, 1318, 1319, 1327, 1328, 1336, 1337, 1345, 1346, 1354, 1355, 1363, 1364, 1372, 1373, 1381, 1382, 1390, 1391, 1399, 1400, 1408, 1409, 1417, 1418, 1426, 1427, 1435, 1436, 1444, 1445, 1453, 1454, 1462, 1463, 1471, 1472, 1480, 1481, 1489, 1490, 1498, 1499, 1507, 1508, 1516, 1517, 1525, 1526, 1534, 1535, 1543, 1544, 1552, 1553, 1561, 1562, 1570, 1571, 1579, 1580, 1588, 1589, 1597, 1598, 1606, 1607, 1615, 1616, 1624, 1625, 1633, 1634, 1642, 1643, 1651, 1652, 1660, 1661, 1669, 1670, 1678, 1679, 1687, 1688, 1696, 1697, 1705, 1706, 1714, 1715, 1723, 1724, 1732, 1733, 1887, 1890, 1895-1897, 1908, 1910, 1912, 1914, 1916, 1918, 1920, 1922, 1924, 1926, 1928, 1930 or fragments or variants thereof; and
[0421] (iii) at least one coding RNA encoding at least one antigenic protein that is or is derived from VP8* of a Rotavirus A from a P[8] serotype as specified herein, according to SEQ ID NOs: 591-594, 600-603, 609-612, 618-621, 627-630, 636-639, 645-648, 654-657, 663-666, 672-675, 681-684, 690-693, 699-702, 708-711, 717-720, 726-729, 735-738, 744-747, 753-756, 762-765, 771-774, 780-783, 789-792, 798-801, 807-810, 816-819, 825-828, 834-837, 843-846, 852-855, 861-864, 870-873, 879-882, 888-891, 897-900, 906-909, 915-918, 924-927, 933-936, 942-945, 951-954, 960-963, 969-972, 978-981, 987-990, 996-999, 1005-1008, 1014-1017, 1023-1026, 1032-1035, 1041-1044, 1050-1053, 1059-1062, 1068-1071, 1077-1080, 1086-1089, 1095-1098, 1104-1107, 1113-1116, 1122-1125, 1131-1134, 1140-1143, 1149-1152, 1158-1161, 1167-1170, 1176-1179, 1185-1188, 1194-1197, 1203-1206, 1212-1215, 1221-1224, 1230-1233, 1239-1242, 1248-1251, 1257-1260, 1266-1269, 1275-1278, 1284-1287, 1293-1296, 1302-1305, 1311-1314, 1320-1323, 1329-1332, 1338-1341, 1347-1350, 1356-1359, 1365-1368, 1374-1377, 1383-1386, 1392-1395, 1401-1404, 1410-1413, 1419-1422, 1428-1431, 1437-1440, 1446-1449, 1455-1458, 1464-1467, 1473-1476, 1482-1485, 1491-1494, 1500-1503, 1509-1512, 1518-1521, 1527-1530, 1536-1539, 1545-1548, 1554-1557, 1563-1566, 1572-1575, 1581-1584, 1590-1593, 1599-1602, 1608-1611, 1617-1620, 1626-1629, 1635-1638, 1644-1647, 1653-1656, 1662-1665, 1671-1674, 1680-1683, 1689-1692, 1698-1701, 1707-1710, 1716-1719, 1725-1728, 1734-1737, 1862-1882, 1885, 1888, 1889, 1891-1894, 1898, or fragments or variants thereof.

[0422] In particularly preferred embodiments, the composition of the second aspect comprises
[0423] (i) one coding RNA encoding at least one antigenic protein that is or is derived from VP8* of a Rotavirus A from a P[4] serotype as specified herein selected from SEQ ID NOs: 586-588, 595-597, 604-606, 613-615, 622-624, 631-633, 640-642, 649-651, 658-660, 667-669, 676-678, 685-687, 694-696, 703-705, 712-714, 721-723, 730-732, 739-741, 748-750, 757-759, 766-768, 775-777, 784-786, 793-795, 802-804, 811-813, 820-822, 829-831, 838-840, 847-849, 856-858, 865-867, 874-876, 883-885, 892-894, 901-903, 910-912, 919-921, 928-930, 937-939, 946-948, 955-957, 964-966, 973-975, 982-984, 991-993, 1000-1002, 1009-1011, 1018-1020, 1027-1029, 1036-1038, 1045-1047, 1054-1056, 1063-1065, 1072-1074, 1081-1083, 1090-1092, 1099-1101, 1108-1110, 1117-1119, 1126-1128, 1135-1137, 1144-1146, 1153-1155, 1162-1164, 1171-1173, 1180-1182, 1189-1191, 1198-1200, 1207-1209, 1216-1218, 1225-1227, 1234-1236, 1243-1245, 1252-1254, 1261-1263, 1270-1272, 1279-1281, 1288-1290, 1297-1299, 1306-1308, 1315-1317, 1324-1326, 1333-1335, 1342-1344, 1351-1353, 1360-1362, 1369-1371, 1378-1380, 1387-1389, 1396-1398, 1405-1407, 1414-1416, 1423-1425, 1432-1434, 1441-1443, 1450-1452, 1459-1461, 1468-1470, 1477-1479, 1486-1488, 1495-1497, 1504-1506, 1513-1515, 1522-1524, 1531-1533, 1540-1542, 1549-1551, 1558-1560, 1567-1569, 1576-1578, 1585-1587, 1594-1596, 1603-1605, 1612-1614, 1621-1623, 1630-1632, 1639-1641, 1648-1650, 1657-1659, 1666-1668, 1675-1677, 1684-1686, 1693-1695, 1702-1704, 1711-1713, 1720-1722, 1729-1731, 1886, 1907, 1909, 1911, 1913, 1915, 1917, 1919, 1921, 1923, 1925, 1927, 1929 or fragments or variants thereof;
[0424] (ii) one coding RNA encoding at least one antigenic protein that is or is derived from VP8* of a Rotavirus A from a P[6] serotype as specified herein selected from SEQ ID NOs: 589, 590, 598, 599, 607, 608, 616, 617, 625, 626, 634, 635, 643, 644, 652, 653, 661, 662, 670, 671, 679, 680, 688, 689, 697, 698, 706, 707, 715, 716, 724, 725, 733, 734, 742, 743, 751, 752, 760, 761, 769, 770, 778, 779, 787, 788, 796, 797, 805, 806, 814, 815, 823, 824, 832, 833, 841, 842, 850, 851, 859, 860, 868, 869, 877, 878, 886, 887, 895, 896, 904, 905, 913, 914, 922, 923, 931, 932, 940, 941, 949, 950, 958, 959, 967, 968, 976, 977, 985, 986, 994, 995, 1003, 1004, 1012, 1013, 1021, 1022, 1030, 1031, 1039, 1040, 1048, 1049, 1057, 1058, 1066, 1067, 1075, 1076, 1084, 1085, 1093, 1094, 1102, 1103, 1111, 1112, 1120, 1121, 1129, 1130, 1138, 1139, 1147, 1148, 1156, 1157, 1165, 1166, 1174, 1175, 1183, 1184, 1192, 1193, 1201, 1202, 1210, 1211, 1219, 1220, 1228, 1229, 1237, 1238, 1246, 1247, 1255, 1256, 1264, 1265, 1273, 1274, 1282, 1283, 1291, 1292, 1300, 1301, 1309, 1310, 1318, 1319, 1327, 1328, 1336, 1337, 1345, 1346, 1354, 1355, 1363, 1364, 1372, 1373, 1381, 1382, 1390, 1391, 1399, 1400, 1408, 1409, 1417, 1418, 1426, 1427, 1435, 1436, 1444, 1445, 1453, 1454, 1462, 1463, 1471, 1472, 1480, 1481, 1489, 1490, 1498, 1499, 1507, 1508, 1516, 1517, 1525, 1526, 1534, 1535, 1543, 1544, 1552, 1553, 1561, 1562, 1570, 1571, 1579, 1580, 1588, 1589, 1597, 1598, 1606, 1607, 1615, 1616, 1624, 1625, 1633, 1634, 1642, 1643, 1651, 1652, 1660, 1661, 1669, 1670, 1678, 1679, 1687, 1688, 1696, 1697, 1705, 1706, 1714, 1715, 1723, 1724, 1732, 1733, 1887, 1890, 1895-1897, 1908, 1910, 1912, 1914, 1916, 1918, 1920, 1922, 1924, 1926, 1928, 1930, or fragments or variants thereof; and
[0425] (iii) one coding RNA encoding at least one antigenic protein that is or is derived from VP8* of a Rotavirus A from a P[8] serotype as specified herein selected from SEQ ID NOs: 591-594, 600-603, 609-612, 618-621, 627-630, 636-639, 645-648, 654-657, 663-666, 672-675, 681-684, 690-693, 699-702, 708-711, 717-720, 726-729, 735-738, 744-747, 753-756, 762-765, 771-774, 780-783, 789-792, 798-801, 807-810, 816-819, 825-828, 834-837, 843-846, 852-855, 861-864, 870-873, 879-882, 888-891, 897-900, 906-909, 915-918, 924-927, 933-936, 942-945, 951-954, 960-963, 969-972, 978-981, 987-990, 996-999, 1005-1008, 1014-1017, 1023-1026, 1032-1035, 1041-1044, 1050-1053, 1059-1062, 1068-1071, 1077-1080, 1086-1089, 1095-1098, 1104-1107, 1113-1116, 1122-1125, 1131-1134, 1140-1143, 1149-1152, 1158-1161, 1167-1170, 1176-1179, 1185-1188, 1194-1197, 1203-1206, 1212-1215, 1221-1224, 1230-1233, 1239-1242, 1248-1251, 1257-1260, 1266-1269, 1275-1278, 1284-1287, 1293-1296, 1302-1305, 1311-1314, 1320-1323, 1329-1332, 1338-1341, 1347-1350, 1356-1359, 1365-1368, 1374-1377, 1383-1386, 1392-1395, 1401-1404, 1410-1413, 1419-1422, 1428-1431, 1437-1440, 1446-1449, 1455-1458, 1464-1467, 1473-1476, 1482-1485, 1491-1494, 1500-1503, 1509-1512, 1518-1521, 1527-1530, 1536-1539, 1545-1548, 1554-1557, 1563-1566, 1572-1575, 1581-1584, 1590-1593, 1599-1602, 1608-1611, 1617-1620, 1626-1629, 1635-1638, 1644-1647, 1653-1656, 1662-1665, 1671-1674, 1680-1683, 1689-1692, 1698-1701, 1707-1710, 1716-1719, 1725-1728, 1734-1737, 1862-1882, 1885, 1888, 1889, 1891-1894, 1898, or fragments or variants thereof.

[0426] In that context, the term “one coding RNA” has to be understood as an ensemble of essentially identical RNA molecule species. The term “one coding RNA” should not be understood as one individual RNA molecule. In preferred embodiments, the one coding RNA of (i), (ii) and (iii) encode the same antigen constructs.

[0427] In embodiments, the composition comprises
[0428] (i) at least one coding RNA encoding at least one antigenic protein that is or is derived from VP8* of a Rotavirus A as specified herein, wherein the antigen construct encodes a secreted protein selected from SEQ ID NOs: mRNAs 622-657, 694-729, 766-801, 838-873, 910-945, 982-1017, 1054-1089, 1126-1161, 1198-1233, 1270-1305, 1342-1377, 1414-1449, 1486-1521, 1558-1593, 1630-1665, 1702-1737, 1875-1882, 1890-1897, 1911-1912, 1917-1918, 1923-1924, 1929-1930, or fragments or variants thereof;
[0429] (ii) at least one coding RNA encoding at least one antigenic protein that is or is derived from VP8* of a Rotavirus A as specified herein, wherein the antigen construct encodes a cytosolic protein selected from SEQ ID NOs: 586-621, 658-693, 730-765, 802-837, 874-909, 946-981, 1018-1053, 1090-1125, 1162-1197, 1234-1269, 1306-1341, 1378-1413, 1450-1485, 1522-1557, 1594-1629, 1666-1701, 1862-1874, 1885, 1898, or fragments or variants thereof; Such a composition comprising at least one coding RNA encoding a secreted VP8* antigen and at least one coding RNA encoding a non-secreted antigen (cytosolic) may be advantageous as strong cellular and strong humoral immune responses, upon administration of the composition, may be induced.

[0430] In various particularly preferred embodiments, the composition of the second aspect comprises
[0431] (i) at least one coding RNA encoding at least one antigenic protein that is or is derived from VP8* (P2-VP8*) of a Rotavirus A from a P[4] serotype as specified herein, preferably according to SEQ ID NOs: 586-588, 595-597, 658-660, 667-669, 730-732, 739-741, 802-804, 811-813, 874-876, 883-885, 946-948, 955-957, 1018-1020, 1027-1029, 1090-1092, 1099-1101, 1162-1164, 1171-1173, 1234-1236, 1243-1245, 1306-1308, 1315-1317, 1378-1380, 1387-1389, 1450-1452, 1459-1461, 1522-1524, 1531-1533, 1594-1596, 1603-1605, 1666-1668, 1675-1677, 1911, 1917, 1923, 1929 or fragments or variants thereof;
[0432] (ii) at least one coding RNA encoding at least one antigenic protein that is or is derived from VP8* (P2-VP8*) of a Rotavirus A from a P[6] serotype as specified herein, preferably according to SEQ ID NOs: 589, 590, 598, 599, 661, 662, 670, 671, 733, 734, 742, 743, 805, 806, 814, 815, 877, 878, 886, 887, 949, 950, 958, 959, 1021, 1022, 1030, 1031, 1093, 1094, 1102, 1103, 1165, 1166, 1174, 1175, 1237, 1238, 1246, 1247, 1309, 1310, 1318, 1319, 1381, 1382, 1390, 1391, 1453, 1454, 1462, 1463, 1525, 1526, 1534, 1535, 1597, 1598, 1606, 1607, 1669, 1670, 1678, 1679, 1912, 1918, 1924, 1939, or fragments or variants thereof; and
[0433] (iii) at least one coding RNA encoding at least one antigenic protein that is or is derived from VP8* (P2-VP8*) of a Rotavirus A from a P[8] serotype as specified herein, according to SEQ ID NOs: 591-594, 600-603, 663-666, 672-675, 735-738, 744-747, 807-810, 816-819, 879-882, 888-891, 951-954, 960-963, 1023-1026, 1032-1035, 1095-1098, 1104-1107, 1167-1170, 1176-1179, 1239-1242, 1248-1251, 1311-1314, 1320-1323, 1383-1386, 1392-1395, 1455-1458, 1464-1467, 1527-1530, 1536-1539, 1599-1602, 1608-1611, 1671-1674, 1680-1683, 1862-1871, 1885, 1898, or fragments or variants thereof.

[0434] In various particularly preferred embodiments, the composition of the second aspect comprises
[0435] (i) at least one coding RNA encoding at least one antigenic protein that is or is derived from VP8* comprising the heterologous antigen clustering domain ferritin of a Rotavirus A from a P[4] serotype as specified herein (comprising the heterologous antigen clustering domain ferritin), preferably according to SEQ ID NOs: 604-606, 613-615, 676-678, 685-687, 748-750, 757-759, 820-822, 829-831, 892-894, 901-903, 964-966, 973-975, 1036-1038, 1045-1047, 1108-1110, 1117-1119, 1180-1182, 1189-1191, 1252-1254, 1261-1263, 1324-1326, 1333-1335, 1396-1398, 1405-1407, 1468-1470, 1477-1479, 1540-1542, 1549-1551, 1612-1614, 1621-1623, 1684-1686, 1693-1695, or fragments or variants thereof;
[0436] (ii) at least one coding RNA encoding at least one antigenic protein that is or is derived from VP8* of a Rotavirus A from a P[6] serotype as specified herein (comprising the heterologous antigen clustering domain ferritin), preferably according to SEQ ID NOs: 607, 608, 616, 617, 679, 680, 688, 689, 751, 752, 760, 761, 823, 824, 832, 833, 895, 896, 904, 905, 967, 968, 976, 977, 1039, 1040, 1048, 1049, 1111, 1112, 1120, 1121, 1183, 1184, 1192, 1193, 1255, 1256, 1264, 1265, 1327, 1328, 1336, 1337, 1399, 1400, 1408, 1409, 1471, 1472, 1480, 1481, 1543, 1544, 1552, 1553, 1615, 1616, 1624, 1625, 1687, 1688, 1696, 1697, or fragments or variants thereof; and
[0437] (iii) at least one coding RNA encoding at least one antigenic protein that is or is derived from VP8* of a Rotavirus A from a P[8] serotype as specified herein (comprising the heterologous antigen clustering domain ferritin), according to SEQ ID NOs: 609-612, 618-621, 681-684, 690-693, 753-756, 762-765, 825-828, 834-837, 897-900, 906-909, 969-972, 978-981, 1041-1044, 1050-1053, 1113-1116, 1122-1125, 1185-1188, 1194-1197, 1257-1260, 1266-1269, 1329-1332, 1338-1341, 1401-1404, 1410-1413, 1473-1476, 1482-1485, 1545-1548, 1554-1557, 1617-1620, 1626-1629, 1689-1692, 1698-1701, 1872-1874, or fragments or variants thereof.

[0438] In various particularly preferred embodiments, the composition of the second aspect comprises
[0439] (i) at least one coding RNA encoding at least one antigenic protein that is or is derived from VP8* of a Rotavirus A from a P[4] serotype as specified herein (comprising the heterologous antigen clustering domain lumazine synthase epitope), preferably according to SEQ ID NOs: 622-624, 631-633, 694-696, 703-705, 766-768, 775-777, 838-840, 847-849, 910-912, 919-921, 982-984, 991-993, 1054-1056, 1063-1065, 1126-1128, 1135-1137, 1198-1200, 1207-1209, 1270-1272, 1279-1281, 1342-1344, 1351-1353, 1414-1416, 1423-1425, 1486-1488, 1495-1497, 1558-1560, 1567-1569, 1630-1632, 1639-1641, 1702-1704, 1711-1713, 1911, 1917, 1923, 1929 or fragments or variants thereof;
[0440] (ii) at least one coding RNA encoding at least one antigenic protein that is or is derived from VP8* of a Rotavirus A from a P[6] serotype as specified herein (comprising the heterologous antigen clustering domain lumazine synthase epitope), preferably according to SEQ ID NOs: 625, 626, 634, 635, 697, 698, 706, 707, 769, 770, 778, 779, 841, 842, 850, 851, 913, 914, 922, 923, 985, 986, 994, 995, 1057, 1058, 1066, 1067, 1129, 1130, 1138, 1139, 1201, 1202, 1210, 1211, 1273, 1274, 1282, 1283, 1345, 1346, 1354, 1355, 1417, 1418, 1426, 1427, 1489, 1490, 1498, 1499, 1561, 1562, 1570, 1571, 1633, 1634, 1642, 1643, 1705, 1706, 1714, 1715, 1912, 1918, 1924, 1939 or fragments or variants thereof; and
[0441] (iii) at least one coding RNA encoding at least one antigenic protein that is or is derived from VP8* of a Rotavirus A from a P[8] serotype as specified herein (comprising the heterologous antigen clustering domain lumazine synthase epitope), according to SEQ ID NOs: 627-630, 636-639, 699-702, 708-711, 771-774, 780-783, 843-846, 862-855, 915-918, 924-927, 987-990, 996-999, 1059-1062, 1068-1071, 1131-1134, 1140-1143, 1203-1206, 1212-1215, 1275-1278, 1284-1287, 1347-1350, 1356-1359, 1419-1422, 1428-1431, 1491-1494, 1500-1503, 1563-1566, 1572-1575, 1635-1638, 1644-1647, 1707-1710, 1716-1719, 1875-1877, or fragments or variants thereof.

[0442] In various particularly preferred embodiments, the composition of the second aspect comprises
[0443] (i) at least one coding RNA encoding at least one antigenic protein that is or is derived from VP8* of a Rotavirus A from a P[4] serotype as specified herein (comprising the heterologous signal sequence IgE), preferably according to SEQ ID NOs: 640-642, 649-651, 712-714, 721-723, 784-786, 793-795, 856-858, 865-867, 928-930, 937-939, 1000-1002, 1009-1011, 1072-1074, 1081-1083, 1144-1146, 1153-1155, 1216-1218, 1225-1227, 1288-1290, 1297-1299, 1360-1362, 1369-1371, 1432-1434, 1441-1443, 1504-1506, 1513-1515, 1576-1578, 1585-1587, 1648-1650, 1657-1659, 1720-1722, 1729-1731, or fragments or variants thereof;
[0444] (ii) at least one coding RNA encoding at least one antigenic protein that is or is derived from VP8* of a Rotavirus A from a P[6] serotype as specified herein (comprising the heterologous signal sequence IgE), preferably according to SEQ ID NOs: 643, 644, 652, 653, 715, 716, 724, 725, 787, 788, 796, 797, 859, 860, 868, 869, 931, 932, 940, 941, 1003, 1004, 1012, 1013, 1075, 1076, 1084, 1085, 1147, 1148, 1156, 1157, 1219, 1220, 1228, 1229, 1291, 1292, 1300, 1301, 1363, 1364, 1372, 1373, 1435, 1436, 1444, 1445, 1507, 1508, 1516, 1517, 1579, 1580, 1588, 1589, 1651, 1652, 1660, 1661, 1723, 1724, 1732, 1733, or fragments or variants thereof; and
[0445] (iii) at least one coding RNA encoding at least one antigenic protein that is or is derived from VP8* of a Rotavirus A from a P[8] serotype as specified herein (comprising the heterologous signal sequence IgE), according to SEQ ID NOs: 645-648, 654-657, 717-720, 726-729, 789-792, 798-801, 861-864, 870-873, 933-936, 942-945, 1005-1008, 1014-1017, 1077-1080, 1086-1089, 1149-1152, 1158-1161, 1221-1224, 1230-1233, 1293-1296, 1302-1305, 1365-1368, 1374-1377, 1437-1440, 1446-1449, 1509-1512, 1518-1521, 1581-1584, 1590-1593, 1653-1656, 1662-1665, 1725-1728, 1734-1737, 1878-1880, or fragments or variants thereof.

[0446] In particularly preferred embodiments, the composition of the second aspect comprises
[0447] (i) at least one coding RNA encoding at least one antigenic protein that is or is derived from VP8* of a Rotavirus A from a P[4] serotype as specified herein, preferably according to SEQ ID NOs: 586-588, 595-597, 604-606, 613-615, 622-624, 631-633, 640-642, 649-651, 658-660, 667-669, 676-678, 685-687, 694-696, 703-705, 712-714, 721-723, 730-732, 739-741, 748-750, 757-759, 766-768, 775-777, 784-786, 793-795, 802-804, 811-813, 820-822, 829-831, 838-840, 847-849, 856-858, 865-867, 874-876, 883-885, 892-894, 901-903, 910-912, 919-921, 928-930, 937-939, 946-948, 955-957, 964-966, 973-975, 982-984, 991-993, 1000-1002, 1009-1011, 1018-1020, 1027-1029, 1036-1038, 1045-1047, 1054-1056, 1063-1065, 1072-1074, 1081-1083, 1090-1092, 1099-1101, 1108-1110, 1117-1119, 1126-1128, 1135-1137, 1144-1146, 1153-1155, 1162-1164, 1171-1173, 1180-1182, 1189-1191, 1198-1200, 1207-1209, 1216-1218, 1225-1227, 1234-1236, 1243-1245, 1252-1254, 1261-1263, 1270-1272, 1279-1281, 1288-1290, 1297-1299, 1306-1308, 1315-1317, 1324-1326, 1333-1335, 1342-1344, 1351-1353, 1360-1362, 1369-1371, 1378-1380, 1387-1389, 1396-1398, 1405-1407, 1414-1416, 1423-1425, 1432-1434, 1441-1443, 1450-1452, 1459-1461, 1468-1470, 1477-1479, 1486-1488, 1495-1497, 1504-1506, 1513-1515, 1522-1524, 1531-1533, 1540-1542, 1549-1551, 1558-1560, 1567-1569, 1576-1578, 1585-1587, 1594-1596, 1603-1605, 1612-1614, 1621-1623, 1630-1632, 1639-1641, 1648-1650, 1657-1659, 1666-1668, 1675-1677, 1684-1686, 1693-1695, 1702-1704, 1711-1713, 1720-1722, 1729-1731, 1886, 1911, 1917, 1923, 1929 or fragments or variants thereof;
[0448] (ii) at least one coding RNA encoding at least one antigenic protein that is or is derived from VP8* of a Rotavirus A from a P[6] serotype as specified herein, preferably according to SEQ ID NOs: 589, 590, 598, 599, 607, 608, 616, 617, 625, 626, 634, 635, 643, 644, 652, 653, 661, 662, 670, 671, 679, 680, 688, 689, 697, 698, 706, 707, 715, 716, 724, 725, 733, 734, 742, 743, 751, 752, 760, 761, 769, 770, 778, 779, 787, 788, 796, 797, 805, 806, 814, 815, 823, 824, 832, 833, 841, 842, 850, 851, 859, 860, 868, 869, 877, 878, 886, 887, 895, 896, 904, 905, 913, 914, 922, 923, 931, 932, 940, 941, 949, 950, 958, 959, 967, 968, 976, 977, 985, 986, 994, 995, 1003, 1004, 1012, 1013, 1021, 1022, 1030, 1031, 1039, 1040, 1048, 1049, 1057, 1058, 1066, 1067, 1075, 1076, 1084, 1085, 1093, 1094, 1102, 1103, 1111, 1112, 1120, 1121, 1129, 1130, 1138, 1139, 1147, 1148, 1156, 1157, 1165, 1166, 1174, 1175, 1183, 1184, 1192, 1193, 1201, 1202, 1210, 1211, 1219, 1220, 1228, 1229, 1237, 1238, 1246, 1247, 1255, 1256, 1264, 1265, 1273, 1274, 1282, 1283, 1291, 1292, 1300, 1301, 1309, 1310, 1318, 1319, 1327, 1328, 1336, 1337, 1345, 1346, 1354, 1355, 1363, 1364, 1372, 1373, 1381, 1382, 1390, 1391, 1399, 1400, 1408, 1409, 1417, 1418, 1426, 1427, 1435, 1436, 1444, 1445, 1453, 1454, 1462, 1463, 1471, 1472, 1480, 1481, 1489, 1490, 1498, 1499, 1507, 1508, 1516, 1517, 1525, 1526, 1534, 1535, 1543, 1544, 1552, 1553, 1561, 1562, 1570, 1571, 1579, 1580, 1588, 1589, 1597, 1598, 1606, 1607, 1615, 1616, 1624, 1625, 1633, 1634, 1642, 1643, 1651, 1652, 1660, 1661, 1669, 1670, 1678, 1679, 1687, 1688, 1696, 1697, 1705, 1706, 1714, 1715, 1723, 1724, 1732, 1733, 1887, 1890, 1895-1897, 1912, 1918, 1924, 1939 or fragments or variants thereof; and
[0449] (iii) at least one coding RNA encoding at least one antigenic protein that is or is derived from VP8* of a Rotavirus A from a P[8] serotype as specified herein, according to SEQ ID NOs: 591-594, 600-603, 609-612, 618-621, 627-630, 636-639, 645-648, 654-657, 663-666, 672-675, 681-684, 690-693, 699-702, 708-711, 717-720, 726-729, 735-738, 744-747, 753-756, 762-765, 771-774, 780-783, 789-792, 798-801, 807-810, 816-819, 825-828, 834-837, 843-846, 852-855, 861-864, 870-873, 879-882, 888-891, 897-900, 906-909, 915-918, 924-927, 933-936, 942-945, 951-954, 960-963, 969-972, 978-981, 987-990, 996-999, 1005-1008, 1014-1017, 1023-1026, 1032-1035, 1041-1044, 1050-1053, 1059-1062, 1068-1071, 1077-1080, 1086-1089, 1095-1098, 1104-1107, 1113-1116, 1122-1125, 1131-1134, 1140-1143, 1149-1152, 1158-1161, 1167-1170, 1176-1179, 1185-1188, 1194-1197, 1203-1206, 1212-1215, 1221-1224, 1230-1233, 1239-1242, 1248-1251, 1257-1260, 1266-1269, 1275-1278, 1284-1287, 1293-1296, 1302-1305, 1311-1314, 1320-1323, 1329-1332, 1338-1341, 1347-1350, 1356-1359, 1365-1368, 1374-1377, 1383-1386, 1392-1395, 1401-1404, 1410-1413, 1419-1422, 1428-1431, 1437-1440, 1446-1449, 1455-1458, 1464-1467, 1473-1476, 1482-1485, 1491-1494, 1500-1503, 1509-1512, 1518-1521, 1527-1530, 1536-1539, 1545-1548, 1554-1557, 1563-1566, 1572-1575, 1581-1584, 1590-1593, 1599-1602, 1608-1611, 1617-1620, 1626-1629, 1635-1638, 1644-1647, 1653-1656, 1662-1665, 1671-1674, 1680-1683, 1689-1692, 1698-1701, 1707-1710, 11716-1719, 1725-1728, 1734-1737, 1862-1882, 1885, 1888, 1889, 1891-1894, 1898, or fragments or variants thereof,

[0450] wherein the coding RNAs comprise a cap1 structure, preferably obtainable by co-transcriptional capping using a trinucleotide cap1 analog.

[0451] In particularly preferred embodiments, the composition of the second aspect comprises
[0452] (i) at least one coding RNA encoding at least one antigenic protein that is or is derived from VP8* of a Rotavirus A from a P[4] serotype as specified herein, preferably according to SEQ ID NOs: 586-588, 595-597, 604-606, 613-615, 622-624, 631-633, 640-642, 649-651, 658-660, 667-669, 676-678, 685-687, 694-696, 703-705, 712-714, 721-723, 730-732, 739-741, 748-750, 757-759, 766-768, 775-777, 784-786, 793-795, 802-804, 811-813, 820-822, 829-831, 838-840, 847-849, 856-858, 865-867, 874-876, 883-885, 892-894, 901-903, 910-912, 919-921, 928-930, 937-939, 946-948, 955-957, 964-966, 973-975, 982-984, 991-993, 1000-1002, 1009-1011, 1018-1020, 1027-1029, 1036-1038, 1045-1047, 1054-1056, 1063-1065, 1072-1074, 1081-1083, 1090-1092, 1099-1101, 1108-1110, 1117-1119, 1126-1128, 1135-1137, 1144-1146, 1153-1155, 1162-1164, 1171-1173, 1180-1182, 1189-1191, 1198-1200, 1207-1209, 1216-1218, 1225-1227, 1234-1236, 1243-1245, 1252-1254, 1261-1263, 1270-1272, 1279-1281, 1288-1290, 1297-1299, 1306-1308, 1315-1317, 1324-1326, 1333-1335, 1342-1344, 1351-1353, 1360-1362, 1369-1371, 1378-1380, 1387-1389, 1396-1398, 1405-1407, 1414-1416, 1423-1425, 1432-1434, 1441-1443, 1450-1452, 1459-1461, 1468-1470, 1477-1479, 1486-1488, 1495-1497, 1504-1506, 1513-1515, 1522-1524, 1531-1533, 1540-1542, 1549-1551, 1558-1560, 1567-1569, 1576-1578, 1585-1587, 1594-1596, 1603-1605, 1612-1614, 1621-1623, 1630-1632, 1639-1641, 1648-1650, 1657-1659, 1666-1668, 1675-1677, 1684-1686, 1693-1695, 1702-1704, 1711-1713, 1720-1722, 1729-1731, 1911, 1917, 1923, 1929 or fragments or variants thereof;
[0453] (ii) at least one coding RNA encoding at least one antigenic protein that is or is derived from VP8* of a Rotavirus A from a P[6] serotype as specified herein, preferably according to SEQ ID NOs: 589, 590, 598, 599, 607, 608, 616, 617, 625, 626, 634, 635, 643, 644, 652, 653, 661, 662, 670, 671, 679, 680, 688, 689, 697, 698, 706, 707, 715, 716, 724, 725, 733, 734, 742, 743, 751, 752, 760, 761, 769, 770, 778, 779, 787, 788, 796, 797, 805, 806, 814, 815, 823, 824, 832, 833, 841, 842, 850, 851, 859, 860, 868, 869, 877, 878, 886, 887, 895, 896, 904, 905, 913, 914, 922, 923, 931, 932, 940, 941, 949, 950, 958, 959, 967, 968, 976, 977, 985, 986, 994, 995, 1003, 1004, 1012, 1013, 1021, 1022, 1030, 1031, 1039, 1040, 1048, 1049, 1057, 1058, 1066, 1067, 1075, 1076, 1084, 1085, 1093, 1094, 1102, 1103, 1111, 1112, 1120, 1121, 1129, 1130, 1138, 1139, 1147, 1148, 1156, 1157, 1165, 1166, 1174, 1175, 1183, 1184, 1192, 1193, 1201, 1202, 1210, 1211, 1219, 1220, 1228, 1229, 1237, 1238, 1246, 1247, 1255, 1256, 1264, 1265, 1273, 1274, 1282, 1283, 1291, 1292, 1300, 1301, 1309, 1310, 1318, 1319, 1327, 1328, 1336, 1337, 1345, 1346, 1354, 1355, 1363, 1364, 1372, 1373, 1381, 1382, 1390, 1391, 1399, 1400, 1408, 1409, 1417, 1418, 1426, 1427, 1435, 1436, 1444, 1445, 1453, 1454, 1462, 1463, 1471, 1472, 1480, 1481, 1489, 1490, 1498, 1499, 1507, 1508, 1516, 1517, 1525, 1526, 1534, 1535, 1543, 1544, 1552, 1553, 1561, 1562, 1570, 1571, 1579, 1580, 1588, 1589, 1597, 1598, 1606, 1607, 1615, 1616, 1624, 1625, 1633, 1634, 1642, 1643, 1651, 1652, 1660, 1661, 1669, 1670, 1678, 1679, 1687, 1688, 1696, 1697, 1705, 1706, 1714, 1715, 1723, 1724, 1732, 1733, 1912, 1918, 1924, 1939, or fragments or variants thereof; and
[0454] (iii) at least one coding RNA encoding at least one antigenic protein that is or is derived from VP8* of a Rotavirus A from a P[8] serotype as specified herein, according to SEQ ID NOs: 591-594, 600-603, 609-612, 618-621, 627-630, 636-639, 645-648, 654-657, 663-666, 672-675, 681-684, 690-693, 699-702, 708-711, 717-720, 726-729, 735-738, 744-747, 753-756, 762-765, 771-774, 780-783, 789-792, 798-801, 807-810, 816-819, 825-828, 834-837, 843-846, 852-855, 861-864, 870-873, 879-882, 888-891, 897-900, 906-909, 915-918, 924-927, 933-936, 942-945, 951-954, 960-963, 969-972, 978-981, 987-990, 996-999, 1005-1008, 1014-1017, 1023-1026, 1032-1035, 1041-1044, 1050-1053, 1059-1062, 1068-1071, 1077-1080, 1086-1089, 1095-1098, 1104-1107, 1113-1116, 1122-1125, 1131-1134, 1140-1143, 1149-1152, 1158-1161, 1167-1170, 1176-1179, 1185-1188, 1194-1197, 1203-1206, 1212-1215, 1221-1224, 1230-1233, 1239-1242, 1248-1251, 1257-1260, 1266-1269, 1275-1278, 1284-1287, 1293-1296, 1302-1305, 1311-1314, 1320-1323, 1329-1332, 1338-1341, 1347-1350, 1356-1359, 1365-1368, 1374-1377, 1383-1386, 1392-1395, 1401-1404, 1410-1413, 1419-1422, 1428-1431, 1437-1440, 1446-1449, 1455-1458, 1464-1467, 1473-1476, 1482-1485, 1491-1494, 1500-1503, 1509-1512, 1518-1521, 1527-1530, 1536-1539, 1545-1548, 1554-1557, 1563-1566, 1572-1575, 1581-1584, 1590-1593, 1599-1602, 1608-1611, 1617-1620, 1626-1629, 1635-1638, 1644-1647, 1653-1656, 1662-1665, 1671-1674, 1680-1683, 1689-1692, 1698-1701, 1707-1710, 1716-1719, 1725-1728, 1734-1737, 1862, 1863, 1866, 1867, 1872, 1873, 1875, 1876, 1878, 1879, 1898, or fragments or variants thereof,

[0455] wherein the poly(A) sequence is suitably located at the 3′ terminus of the coding RNA and wherein preferably the coding RNAs comprise a cap1 structure, preferably obtainable by co-transcriptional capping using a trinucleotide cap1 analog.

[0456] In particularly preferred embodiments, the composition of the second aspect comprises
[0457] (i) at least one coding RNA encoding at least one antigenic protein that is or is derived from VP8* of a Rotavirus A from a P[4] serotype as specified herein, preferably according to SEQ ID NOs: 586-588, 595-597, 604-606, 613-615, 622-624, 631-633, 640-642, 649-651, 658-660, 667-669, 676-678, 685-687, 694-696, 703-705, 712-714, 721-723, 730-732, 739-741, 748-750, 757-759, 766-768, 775-777, 784-786, 793-795, 802-804, 811-813, 820-822, 829-831, 838-840, 847-849, 856-858, 865-867, 1162-1164, 1171-1173, 1180-1182, 1189-1191, 1198-1200, 1207-1209, 1216-1218, 1225-1227, 1234-1236, 1243-1245, 1252-1254, 1261-1263, 1270-1272, 1279-1281, 1288-1290, 1297-1299, 1306-1308, 1315-1317, 1324-1326, 1333-1335, 1342-1344, 1351-1353, 1360-1362, 1369-1371, 1378-1380, 1387-1389, 1396-1398, 1405-1407, 1414-1416, 1423-1425, 1432-1434, 1441-1443, 1911, 1917, 1923, 1929 or fragments or variants thereof;
[0458] (ii) at least one coding RNA encoding at least one antigenic protein that is or is derived from VP8* of a Rotavirus A from a P[6] serotype as specified herein, preferably according to SEQ ID NOs: 589, 590, 598, 599, 607, 608, 616, 617, 625, 626, 634, 635, 643, 644, 652, 653, 661, 662, 670, 671, 679, 680, 688, 689, 697, 698, 706, 707, 715, 716, 724, 725, 733, 734, 742, 743, 751, 752, 760, 761, 769, 770, 778, 779, 787, 788, 796, 797, 805, 806, 814, 815, 823, 824, 832, 833, 841, 842, 850, 851, 859, 860, 868, 869, 1165, 1166, 1174, 1175, 1183, 1184, 1192, 1193, 1201, 1202, 1210, 1211, 1219, 1220, 1228, 1229, 1237, 1238, 1246, 1247, 1255, 1256, 1264, 1265, 1273, 1274, 1282, 1283, 1291, 1292, 1300, 1301, 1309, 1310, 1318, 1319, 1327, 1328, 1336, 1337, 1345, 1346, 1354, 1355, 1363, 1364, 1372, 1373, 1381, 1382, 1390, 1391, 1399, 1400, 1408, 1409, 1417, 1418, 1426, 1427, 1435, 1436, 1444, 1445, 1912, 1918, 1924, 1939 or fragments or variants thereof; and
[0459] (iii) at least one coding RNA encoding at least one antigenic protein that is or is derived from VP8* of a Rotavirus A from a P[8] serotype as specified herein, according to SEQ ID NOs: 591-594, 600-603, 609-612, 618-621, 627-630, 636-639, 645-648, 654-657, 663-666, 672-675, 681-684, 690-693, 699-702, 708-711, 717-720, 726-729, 735-738, 744-747, 753-756, 762-765, 771-774, 780-783, 789-792, 798-801, 807-810, 816-819, 825-828, 834-837, 843-846, 852-855, 861-864, 870-873, 1167-1170, 1176-1179, 1185-1188, 1194-1197, 1203-1206, 1212-1215, 1221-1224, 1230-1233, 1239-1242, 1248-1251, 1257-1260, 1266-1269, 1275-1278, 1284-1287, 1293-1296, 1302-1305, 1311-1314, 1320-1323, 1329-1332, 1338-1341, 1347-1350, 1356-1359, 1365-1368, 1374-1377, 1383-1386, 1392-1395, 1401-1404, 1410-1413, 1419-1422, 1428-1431, 1437-1440, 1446-1449, 1862, 1863, 1866, 1867, 1872, 1873, 1875, 1876, 1878, 1879, or fragments or variants thereof,

[0460] wherein the coding RNA comprises at least one heterologous 5′-UTR derived from a 5′-UTR of a HSD17B4 gene and/or at least one heterologous 3′-UTR derived from a PSMB3 gene,

[0461] wherein the poly(A) sequence is suitably located at the 3′ terminus of the coding RNA and

[0462] wherein preferably the coding RNAs comprise a cap1 structure, preferably obtainable by co-transcriptional capping using a trinucleotide cap1 analogue.

[0463] Complexation:

[0464] In a preferred embodiment of the second aspect, the at least one coding RNA, or the plurality of coding RNAs (RNA species), is complexed or associated with to obtain a formulated composition. A formulation in that context may have the function of a transfection agent. A formulation in that context may also have the function of protecting the coding RNA from degradation.

[0465] In a preferred embodiment of the second aspect, the at least one coding RNA, or the plurality of coding RNAs (RNA species), is complexed or associated with or at least partially complexed or partially associated with one or more cationic or polycationic compound, preferably cationic or polycationic polymer, cationic or polycationic polysaccharide, cationic or polycationic lipid, cationic or polycationic protein, cationic or polycationic peptide, or any combinations thereof.

[0466] In embodiments where more than one or a plurality, e.g. 2, 3, 4, 5, 6, 7, 8, 9, 10 of the RNAs of the first aspect are comprised in the composition, said more than one or said plurality e.g. 2, 3, 4, 5, 6, 7, 8, 9, 10 of the RNAs may be complexed thereby forming complexes comprising more than one or a plurality, e.g. 2, 3, 4, 5, 6, 7, 8, 9, 10 of different RNAs (herein referred to as “co-formulation”)

[0467] Alternatively, in embodiments where more than one or a plurality, e.g. 2, 3, 4, 5, 6, 7, 8, 9, 10 of the RNAs of the first aspect are comprised in the composition, said more than one or said plurality e.g. 2, 3, 4, 5, 6, 7, 8, 9, 10 of the RNAs may be complexed as separate compositions e.g. as 2, 3, 4, 5, 6, 7, 8, 9, 10 separate compositions. Said separate compositions may be unified to form a composition comprising more than one or a plurality, e.g. 2, 3, 4, 5, 6, 7, 8, 9, 10 of the complexed RNA species.

[0468] The term “cationic or polycationic compound” as used herein will be recognized and understood by the person of ordinary skill in the art, and are for example intended to refer to a charged molecule, which is positively charged at a pH value ranging from about 1 to 9, at a pH value ranging from about 3 to 8, at a pH value ranging from about 4 to 8, at a pH value ranging from about 5 to 8, more preferably at a pH value ranging from about 6 to 8, even more preferably at a pH value ranging from about 7 to 8, most preferably at a physiological pH, e.g. ranging from about 7.2 to about 7.5. Accordingly, a cationic component, e.g. a cationic peptide, cationic protein, cationic polymer, cationic polysaccharide, cationic lipid may be any positively charged compound or polymer which is positively charged under physiological conditions. A “cationic or polycationic peptide or protein” may contain at least one positively charged amino acid, or more than one positively charged amino acid, e.g. selected from Arg, His, Lys or Orn. Accordingly, “polycationic” components are also within the scope exhibiting more than one positive charge under the given conditions.

[0469] Cationic or polycationic compounds, being particularly preferred in this context may be selected from the following list of cationic or polycationic peptides or proteins of fragments thereof: protamine, nucleoline, spermine or spermidine, or other cationic peptides or proteins, such as poly-L-lysine (PLL), poly-arginine, basic polypeptides, cell penetrating peptides (CPPs), including HIV-binding peptides, HIV-1 Tat (HIV), Tat-derived peptides, Penetratin, VP22 derived or analog peptides, HSV VP22 (Herpes simplex), MAP, KALA or protein transduction domains (PTDs), PpT620, prolin-rich peptides, arginine-rich peptides, lysine-rich peptides, MPG-peptide(s), Pep-1, L-oligomers, Calcitonin peptide(s), Antennapedia-derived peptides, pAntp, plsl, FGF, Lactoferrin, Transportan, Buforin-2, Bac715-24, SynB, SynB(1), pVEC, hCT-derived peptides, SAP, or histones. More preferably, the coding RNA, preferably the mRNA, is complexed with one or more polycations, preferably with protamine or oligofectamine, most preferably with protamine.

[0470] In preferred embodiment, the coding RNA, or the plurality of coding RNAs, is complexed with protamine.

[0471] Further preferred cationic or polycationic compounds, which can be used as transfection or complexation agent may include cationic polysaccharides, for example chitosan, polybrene etc.; cationic lipids, e.g. DOTMA, DMRIE, di-C14-amidine, DOTIM, SAINT, DC-Chol, BGTC, CTAP, DOPC, DODAP, DOPE: Dioleyl phosphatidylethanol-amine, DOSPA, DODAB, DOIC, DMEPC, DOGS, DIMRI, DOTAP, DC-6-14, CLIP1, CLIP6, CLIP9, oligofectamine; or cationic or polycationic polymers, e.g. modified polyaminoacids, such as beta-amino acid-polymers or reversed polyamides, etc., modified polyethylenes, such as PVP etc., modified acrylates, such as pDMAEMA etc., modified amidoamines such as pAMAM etc., modified polybetaaminoester (PBAE), such as diamine end modified 1,4 butanediol diacrylate-co-5-amino-1-pentanol polymers, etc., dendrimers, such as polypropylamine dendrimers or pAMAM based dendrimers, etc., polyimine(s), such as PEI, poly(propyleneimine), etc., polyallylamine, sugar backbone based polymers, such as cyclodextrin based polymers, dextran based polymers, etc., silan backbone based polymers, such as PMOXA-PDMS copolymers, etc., blockpolymers consisting of a combination of one or more cationic blocks (e.g. selected from a cationic polymer as mentioned above) and of one or more hydrophilic or hydrophobic blocks (e.g. polyethyleneglycole); etc.

[0472] In this context it is particularly preferred that the at least one coding RNA is complexed or at least partially complexed with a cationic or polycationic compound and/or a polymeric carrier, preferably cationic proteins or peptides. In this context, the disclosure of WO2010/037539 and WO2012/113513 is incorporated herewith by reference. Partially means that only a part of the coding RNA is complexed with a cationic compound and that the rest of the RNA is (comprised in the inventive (pharmaceutical) composition) in uncomplexed form (“free”).

[0473] In embodiments, the composition comprises at least one coding RNA complexed with one or more cationic or polycationic compounds, preferably protamine, and at least one free (non-complexed) coding RNA.

[0474] In this context it is particularly preferred that the at least one coding RNA is complexed, or at least partially complexed with protamine. Preferably, the molar ratio of the nucleic acid, particularly the RNA of the protamine-complexed RNA to the free RNA may be selected from a molar ratio of about 0.001:1 to about 1:0.001, including a ratio of about 1:1. Suitably, the complexed RNA is complexed with protamine by addition of protamine-trehalose solution to the RNA sample at a RNA:protamine weight to weight ratio (w/w) of 2:1.

[0475] Further preferred cationic or polycationic proteins or peptides that may be used for complexation can be derived from formula (Arg)l;(Lys)m;(His)n;(Orn)o;(Xaa)x of the patent application WO2009/030481 or WO2011/026641, the disclosure of WO2009/030481 or WO2011/026641 relating thereto incorporated herewith by reference.

[0476] In preferred embodiments, the at least one coding RNA is complexed, or at least partially complexed, with at least one cationic or polycationic proteins or peptides preferably selected from SEQ ID NOs: 1857-1861, or any combinations thereof.

[0477] According to various embodiments, the composition of the present invention comprises at least one coding RNA as defined in the context of the first aspect, and a polymeric carrier.

[0478] The term “polymeric carrier” as used herein will be recognized and understood by the person of ordinary skill in the art, and are e.g. intended to refer to a compound that facilitates transport and/or complexation of another compound (e.g. cargo RNA). A polymeric carrier is typically a carrier that is formed of a polymer. A polymeric carrier may be associated to its cargo (e.g. coding RNA) by covalent or non-covalent interaction. A polymer may be based on different subunits, such as a copolymer.

[0479] Suitable polymeric carriers in that context may include, for example, polyacrylates, polyalkycyanoacrylates, polylactide, polylactide-polyglycolide copolymers, polycaprolactones, dextran, albumin, gelatin, alginate, collagen, chitosan, cyclodextrins, protamine, PEGylated protamine, PEGylated PLL and polyethylenimine (PEI), dithiobis(succinimidylpropionate) (DSP), Dimethyl-3,3′-dithiobispropionimidate (DTBP), poly(ethylene imine) biscarbamate (PEIC), poly(L-lysine) (PLL), histidine modified PLL, poly(N-vinylpyrrolidone) (PVP), poly(propylenimine (PPI), poly(amidoamine) (PAMAM), poly(amido ethylenimine) (SS-PAEI), triehtylenetetramine (TETA), poly(β-aminoester), poly(4-hydroxy-L-proine ester) (PHP), poly(allylamine), poly(α-[4-aminobutyl]-L-glycolic acid (PAGA), Poly(D,L-lactic-co-glycolid acid (PLGA), Poly(N-ethyl-4-vinylpyridinium bromide), poly(phosphazene)s (PPZ), poly(phosphoester)s (PPE), poly(phosphoramidate)s (PPA), poly(N-2-hydroxypropylmethacrylamide) (pHPMA), poly(2-(dimethylamino)ethyl methacrylate) (pDMAEMA), poly(2-aminoethyl propylene phosphate) PPE_EA), galactosylated chitosan, N-dodecylated chitosan, histone, collagen and dextran-spermine. In one embodiment, the polymer may be an inert polymer such as, but not limited to, PEG. In one embodiment, the polymer may be a cationic polymer such as, but not limited to, PEI, PLL, TETA, poly(allylamine), Poly(N-ethyl-4-vinylpyridinium bromide), pHPMA and pDMAEMA. In one embodiment, the polymer may be a biodegradable PEI such as, but not limited to, DSP, DTBP and PEIC. In one embodiment, the polymer may be biodegradable such as, but not limited to, histine modified PLL, SS-PAEI, poly(β-aminoester), PHP, PAGA, PLGA, PPZ, PPE, PPA and PPE-EA.

[0480] A suitable polymeric carrier may be a polymeric carrier formed by disulfide-crosslinked cationic compounds. The disulfide-crosslinked cationic compounds may be the same or different from each other. The polymeric carrier can also contain further components. The polymeric carrier used according to the present invention may comprise mixtures of cationic peptides, proteins or polymers and optionally further components as defined herein, which are crosslinked by disulfide bonds (via —SH groups).

[0481] In this context, polymeric carriers according to formula {(Arg)l;(Lys)m;(His)n;(Orn)o;(Xaa′)x(Cys)y} and formula Cys,{(Arg)l;(Lys)m;(His)n;(Orn)o;(Xaa)x)Cys2 of the patent application WO2012/013326 are preferred, the disclosure of WO2012/013326 relating thereto incorporated herewith by reference.

[0482] In embodiments, the polymeric carrier used to complex the a least one coding RNA may be derived from a polymeric carrier molecule according formula (L-P¹—S—[S—P²—S]—S—P³-L) of the patent application WO2011/026641, the disclosure of WO2011/026641 relating thereto incorporated herewith by reference.

[0483] In embodiments, the polymeric carrier compound is formed by, or comprises or consists of the peptide elements CysArg12Cys (SEQ ID NO: 1857) or CysArg12 (SEQ ID NO: 1858) or TrpArg12Cys (SEQ ID NO: 1859). In particularly preferred embodiments, the polymeric carrier compound consists of a (R₁₂C)—(R₁₂C) dimer, a (WR₁₂C)—(WR₁₂C) dimer, or a (CR₁₂)—(CR₁₂C)—(CR₁₂) trimer, wherein the individual peptide elements in the dimer (e.g. (WR₁₂C)), or the trimer (e.g. (CR₁₂)), are connected via —SH groups.

[0484] In a preferred embodiment of the second aspect, the at least one coding RNA of the first aspect is complexed or associated with a polyethylene glycol/peptide polymer comprising HO-PEG5000-S-(S-CHHHHHHRRRRHHHHHHC-S-)7-S-PEG5000-OH (SEQ ID NO: 1860 as peptide monomer), HO-PEG5000-S-(S-CHHHHHHRRRRHHHHHHC-S-)4-S-PEG5000-OH (SEQ ID NO: 1860 as peptide monomer), HO-PEG5000-S-(S-CGHHHHHRRRRHHHHHGC-S-)7-S-PEG5000-OH (SEQ ID NO: 1861 as peptide monomer) and/or a polyethylene glycol/peptide polymer comprising HO-PEG5000-S-(S-CGHHHHHRRRRHHHHHGC-S-)4-S-PEG5000-OH (SEQ ID NO: 1861 of the peptide monomer).

[0485] In other embodiments, the composition comprises at least one coding RNA, wherein the at least one coding RNA is complexed or associated with polymeric carriers and, optionally, with at least one lipid component as described in WO2017/212008A1, WO2017/212006A1, WO2017/212007A1, and WO2017/212009A1. In this context, the disclosures of WO2017/212008A1, WO2017/212006A1, WO2017/212007A1, and WO2017/212009A1 are herewith incorporated by reference.

[0486] In a particularly preferred embodiment, the polymeric carrier (of the first and/or second component) is a peptide polymer, preferably a polyethylene glycol/peptide polymer as defined above, and a lipid component, preferably a lipidoid component.

[0487] A lipidoid (or lipidoit) is a lipid-like compound, i.e. an amphiphilic compound with lipid-like physical properties. The lipidoid is preferably a compound which comprises two or more cationic nitrogen atoms and at least two lipophilic tails. In contrast to many conventional cationic lipids, the lipidoid may be free of a hydrolysable linking group, in particular linking groups comprising hydrolysable ester, amide or carbamate groups. The cationic nitrogen atoms of the lipidoid may be cationisable or permanently cationic, or both types of cationic nitrogens may be present in the compound. In the context of the present invention the term lipid is considered to also encompass lipidoids.

[0488] In some embodiments of the inventions, the lipidoid may comprise a PEG moiety.

[0489] In preferred embodiments, the at least one coding RNA, preferably the mRNA, is complexed or associated with a polymeric carrier, preferably with a polyethylene glycol/peptide polymer as defined above, and a lipidoid component.

[0490] Suitably, the lipidoid is cationic, which means that it is cationisable or permanently cationic. In one embodiment, the lipidoid is cationisable, i.e. it comprises one or more cationisable nitrogen atoms, but no permanently cationic nitrogen atoms. In another embodiment, at least one of the cationic nitrogen atoms of the lipidoid is permanently cationic. Optionally, the lipidoid comprises two permanently cationic nitrogen atoms, three permanently cationic nitrogen atoms, or even four or more permanently cationic nitrogen atoms.

[0491] In a preferred embodiment, the lipidoid component may be any one selected from the lipidoids of the lipidoids provided in the table of page 50-54 of published PCT patent application WO2017/212009A1, the specific lipidoids provided in said table, and the specific disclosure relating thereto herewith incorporated by reference.

[0492] In preferred embodiments, the lipidoid component may be any one selected from 3-C12-OH, 3-C12-OH-cat, 3-C12-amide, 3-C12-amide monomethyl, 3-C12-amide dimethyl, RevPEG(10)-3-C12-OH, RevPEG(10)-DLin-pAbenzoic, 3C12amide-TMA cat., 3C12amide-DMA, 3C12amide-NH2, 3C12amide-OH, 3C12Ester-OH, 3C12 Ester-amin, 3C12Ester-DMA, 2C12Amid-DMA, 3C12-lin-amid-DMA, 2C12-sperm-amid-DMA, or 3C12-sperm-amid-DMA (see table of published PCT patent application WO2017/212009A1 (pages 50-54)). Particularly preferred are 3-C12-OH or 3-C12-OH-cat.

[0493] In preferred embodiments, the polyethylene glycol/peptide polymer comprising a lipidoid as specified above (e.g. 3-C12-OH or 3-C12-OH-cat), is used to complex the at least one coding RNA to form complexes having an N/P ratio from about 0.1 to about 20, or from about 0.2 to about 15, or from about 2 to about 15, or from about 2 to about 12, wherein the N/P ratio is defined as the mole ratio of the nitrogen atoms of the basic groups of the cationic peptide or polymer to the phosphate groups of the nucleic acid. In that context, the disclosure of published PCT patent application WO2017/212009A1, in particular claims 1 to 10 of WO2017/212009A1, and the specific disclosure relating thereto is herewith incorporated by reference.

[0494] Further suitable lipidoids may be derived from published PCT patent application WO2010/053572. In particular, lipidoids derivable from claims 1 to 297 of published PCT patent application WO2010/053572 may be used in the context of the invention, e.g. incorporated into the peptide polymer as described herein, or e.g. incorporated into the lipid nanoparticle (as described below). Accordingly, claims 1 to 297 of published PCT patent application WO2010/053572, and the specific disclosure relating thereto, is herewith incorporated by reference.

[0495] Encapsulation/Complexation in LNPs:

[0496] In preferred embodiments of the second aspect, the at least one coding RNA, preferably the plurality of coding RNAs, is complexed, encapsulated, partially encapsulated, or associated with one or more lipids (e.g. cationic lipids and/or neutral lipids), thereby forming liposomes, lipid nanoparticles (LNPs), lipoplexes, and/or nanoliposomes.

[0497] The liposomes, lipid nanoparticles (LNPs), lipoplexes, and/or nanoliposomes—incorporated RNA may be completely or partially located in the interior space of the liposomes, lipid nanoparticles (LNPs), lipoplexes, and/or nanoliposomes, within the lipid layer/membrane, or associated with the exterior surface of the lipid layer/membrane. The incorporation of a nucleic acid into liposomes/LNPs is also referred to herein as “encapsulation” wherein the RNA is entirely contained within the interior space of the liposomes, lipid nanoparticles (LNPs), lipoplexes, and/or nanoliposomes. The purpose of incorporating coding RNA into liposomes, lipid nanoparticles (LNPs), lipoplexes, and/or nanoliposomes is to protect the RNA from an environment which may contain enzymes or chemicals or conditions that degrade RNA and/or systems or receptors that cause the rapid excretion of the RNA. Moreover, incorporating coding RNA into liposomes, lipid nanoparticles (LNPs), lipoplexes, and/or nanoliposomes may promote the uptake of the RNA, and hence, may enhance the therapeutic effect of the RNA encoding antigenic Rotavirus proteins (e.g., VP8*). Accordingly, incorporating an coding RNA, or a plurality of coding RNA species into liposomes, lipid nanoparticles (LNPs), lipoplexes, and/or nanoliposomes may be particularly suitable for a Rotavirus vaccine, e.g. for intramuscular administration.

[0498] In this context, the terms “complexed” or “associated” refer to the essentially stable combination of coding RNA with one or more lipids into larger complexes or assemblies without covalent binding.

[0499] The term “lipid nanoparticle”, also referred to as “LNP”, is not restricted to any particular morphology, and include any morphology generated when a cationic lipid and optionally one or more further lipids are combined, e.g. in an aqueous environment and/or in the presence of RNA. For example, a liposome, a lipid complex, a lipoplex and the like are within the scope of a lipid nanoparticle (LNP).

[0500] Liposomes, lipid nanoparticles (LNPs), lipoplexes, and/or nanoliposomes can be of different sizes such as, but not limited to, a multilamellar vesicle (MLV) which may be hundreds of nanometers in diameter and may contain a series of concentric bilayers separated by narrow aqueous compartments, a small unicellular vesicle (SUV) which may be smaller than 50 nm in diameter, and a large unilamellar vesicle (LUV) which may be between 50 nm and 500 nm in diameter.

[0501] LNPs of the invention are suitably characterized as microscopic vesicles having an interior aqua space sequestered from an outer medium by a membrane of one or more bilayers. Bilayer membranes of LNPs are typically formed by amphiphilic molecules, such as lipids of synthetic or natural origin that comprise spatially separated hydrophilic and hydrophobic domains. Bilayer membranes of the liposomes can also be formed by amphiphilic polymers and surfactants (e.g., polymerosomes, niosomes, etc.). In the context of the present invention, an LNP typically serves to transport the coding RNA, or the plurality of coding RNA species, to a target tissue.

[0502] Accordingly, in preferred embodiments of the second aspect, the at least one RNA, or the plurality of coding RNAs, is complexed with one or more lipids thereby forming lipid nanoparticles (LNP). Preferably, said LNP is particularly suitable for intramuscular and/or intradermal administration.

[0503] LNPs typically comprise a cationic lipid and one or more excipients selected from neutral lipids, charged lipids, steroids and polymer conjugated lipids (e.g. PEGylated lipid). The coding RNA may be encapsulated in the lipid portion of the LNP or an aqueous space enveloped by some or the entire lipid portion of the LNP. The coding RNA or a portion thereof may also be associated and complexed with the LNP. An LNP may comprise any lipid capable of forming a particle to which the nucleic acids are attached, or in which the one or more nucleic acids are encapsulated. Preferably, the LNP comprising nucleic acids comprises one or more cationic lipids, and one or more stabilizing lipids. Stabilizing lipids include neutral lipids and PEGylated lipids.

[0504] The cationic lipid of an LNP may be cationisable, i.e. it becomes protonated as the pH is lowered below the pK of the ionizable group of the lipid, but is progressively more neutral at higher pH values. At pH values below the pK, the lipid is then able to associate with negatively charged nucleic acids. In certain embodiments, the cationic lipid comprises a zwitterionic lipid that assumes a positive charge on pH decrease.

[0505] Such lipids include, but are not limited to, DSDMA, N,N-dioleyl-N,N-dimethylammonium chloride (DODAC), N,N-distearyl-N,N-dimethylammonium bromide (DDAB), 1,2-dioleoyltrimethyl ammonium propane chloride (DOTAP) (also known as N-(2,3-dioleoyloxy)propyl)-N,N,N-trimethylammonium chloride and 1,2-Dioleyloxy-3-trimethylaminopropane chloride salt), N-(1-(2,3-dioleyloxy)propyl)-N,N,N-trimethylammonium chloride (DOTMA), N,N-dimethyl-2,3-dioleyloxy)propylamine (DODMA), ckk-E12, ckk, 1,2-DiLinoleyloxy-N,N-dimethylaminopropane (DLinDMA), 1,2-Dilinolenyloxy-N,N-dimethylaminopropane (DLenDMA), 1,2-di-γ-linolenyloxy-N,N-dimethylaminopropane (γ-DLenDMA), 98N12-5, 1,2-Dilinoleylcarbamoyloxy-3-dimethylaminopropane (DLin-C-DAP), 1,2-Dilinoleyoxy-3-(dimethylamino)acetoxypropane (DLin-DAC), 1,2-Dilinoleyoxy-3-morpholinopropane (DLin-MA), 1,2-Dilinoleoyl-3-dimethylaminopropane (DLinDAP), 1,2-Dilinoleylthio-3-dimethylaminopropane (DLin-S-DMA), 1-Linoleoyl-2-linoleyloxy-3-dimethylaminopropane (DLin-2-DMAP), 1,2-Dilinoleyloxy-3-trimethylaminopropane chloride salt (DLin-TMA.Cl), ICE (Imidazol-based), HGT5000, HGT5001, DMDMA, CLinDMA, CpLinDMA, DMOBA, DOcarbDAP, DLincarbDAP, DLinCDAP, KLin-K-DMA, DLin-K-XTC2-DMA, XTC (2,2-Dilinoleyl-4-dimethylaminoethyl-[1,3]-dioxolane) HGT4003, 1,2-Dilinoleoyl-3-trimethylaminopropane chloride salt (DLin-TAP.Cl), 1,2-Dilinoleyloxy-3-(N-methylpiperazino)propane (DLin-MPZ), or 3-(N,N-Dilinoleylamino)-1,2-propanediol (DLinAP), 3-(N,N-Dioleylamino)-1,2-propanedio (DOAP), 1,2-Dilinoleyloxo-3-(2-N,N-dimethylamino)ethoxypropane (DLin-EG-DM A), 2,2-Dilinoleyl-4-dimethylaminomethyl-[1,3]-dioxolane (DLin-K-DMA) or analogs thereof, (3aR,5s,6aS)—N,N-dimethyl-2,2-di((9Z,12Z)-octadeca-9,12-dienyl)tetrahydro-3aH-cyclopenta[d][1,3]dioxol-5-amine, (6Z,9Z,28Z,31Z)-heptatriaconta-6,9,28,31-tetraen-19-yl-4-(dimethylamino)butanoate (MC3), ALNY-100 ((3aR,5s,6aS)—N,N-dimethyl-2,2-di((9Z,12Z)-octadeca-9,12-dienyl)tetrahydro-3aH-cyclopenta[d] [1,3]dioxol-5-amine)), 1,1′-(2-(4-(2-((2-(bis(2-hydroxydodecyl)amino)ethyl)(2-hydroxydodecyl)amino)ethyl)piperazin-1-yl)ethylazanediyl)didodecan-2-ol (C12-200), 2,2-dilinoleyl-4-(2-dimethylaminoethyl)-[1,3]-dioxolane (DLin-K-C2-DMA), 2,2-dilinoleyl-4-dimethylaminomethyl-[1,3]-dioxolane (DLin-K-DMA), NC98-5 (4,7, 13-tris(3-oxo-3-(undecylamino)propyl)-NI,N 16-diundecyl-4,7, 10,13-tetraazahexadecane-1,16-diamide), (6Z,9Z,28Z,31Z)-heptatriaconta-6,9,28,31-tetraen-19-yl 4-(dimethylamino) butanoate (DLin-M-C3-DMA), 3-((6Z,9Z,28Z,31Z)-heptatriaconta-6,9,28,31-tetraen-19-yloxy)-N,N-dimethylpropan-1-amine (MC3 Ether), 4-((6Z,9Z,28Z,31Z)-heptatriaconta-6,9,28,31-tetraen-19-yloxy)-N,N-dimethylbutan-1-amine (MC4 Ether), LIPOFECTIN® (commercially available cationic liposomes comprising DOTMA and 1,2-dioleoyl-sn-3phosphoethanolamine (DOPE), from GIBCO/BRL, Grand Island, N.Y.); LIPOFECTAMINE® (commercially available cationic liposomes comprising N-(1-(2,3dioleyloxy)propyl)-N-(2-(sperminecarboxamido)ethyl)-N,N-dimethylammonium trifluoroacetate (DOSPA) and (DOPE), from GIBCO/BRL); and TRANSFECTAM® (commercially available cationic lipids comprising dioctadecylamidoglycyl carboxyspermine (DOGS) in ethanol from Promega Corp., Madison, Wis.) or any combination of any of the foregoing. Further suitable cationic lipids for use in the compositions and methods of the invention include those described in international patent publications WO2010/053572 (and particularly, CI 2-200 described at paragraph [00225]) and WO2012/170930, both of which are incorporated herein by reference, HGT4003, HGT5000, HGTS001, HGT5001, HGT5002 (see US20150140070A1).

[0506] In embodiments, the cationic lipid may be an amino lipid.

[0507] Representative amino lipids include, but are not limited to, 1,2-dilinoleyoxy-3-(dimethylamino)acetoxypropane (DLin-DAC), 1,2-dilinoleyoxy-3morpholinopropane (DLin-MA), 1,2-dilinoleoyl-3-dimethylaminopropane (DLinDAP), 1,2-dilinoleylthio-3-dimethylaminopropane (DLin-S-DMA), 1-linoleoyl-2-linoleyloxy-3dimethylaminopropane (DLin-2-DMAP), 1,2-dilinoleyloxy-3-trimethylaminopropane chloride salt (DLin-TMA.Cl), 1,2-dilinoleoyl-3-trimethylaminopropane chloride salt (DLin-TAP.Cl), 1,2-dilinoleyloxy-3-(N-methylpiperazino)propane (DLin-MPZ), 3-(N,Ndilinoleylamino)-1,2-propanediol (DLinAP), 3-(N,N-dioleylamino)-1,2-propanediol (DOAP), 1,2-dilinoleyloxo-3-(2-N,N-dimethylamino)ethoxypropane (DLin-EG-DMA), and 2,2-dilinoleyl-4-dimethylaminomethyl-[1,3]-dioxolane (DLin-K-DMA), 2,2-dilinoleyl-4-(2-dimethylaminoethyl)-[1,3]-dioxolane (DLin-KC2-DMA); dilinoleyl-methyl-4-dimethylaminobutyrate (DLin-MC3-DMA); MC3 (US20100324120).

[0508] In embodiments, the cationic lipid may be an aminoalcohol lipidoid.

[0509] Aminoalcohol lipidoids which may be used in the present invention may be prepared by the methods described in U.S. Pat. No. 8,450,298, herein incorporated by reference in its entirety. Suitable (ionizable) lipids can also be the compounds as disclosed in Tables 1, 2 and 3 and as defined in claims 1-24 of WO2017/075531A1, hereby incorporated by reference.

[0510] In another embodiment, suitable lipids can also be the compounds as disclosed in WO2015/074085A1 (i.e. ATX-001 to ATX-032 or the compounds as specified in claims 1-26), U.S. Appl. Nos. 61/905,724 and Ser. No. 15/614,499 or U.S. Pat. Nos. 9,593,077 and 9,567,296 hereby incorporated by reference in their entirety.

[0511] In other embodiments, suitable cationic lipids can also be the compounds as disclosed in WO2017/117530A1 (i.e. lipids 13, 14, 15, 16, 17, 18, 19, 20, or the compounds as specified in the claims), hereby incorporated by reference in its entirety.

[0512] In preferred embodiments, ionizable or cationic lipids may also be selected from the lipids disclosed in WO2018/078053A1 (i.e. lipids derived from formula I, II, and III of WO2018/078053A1, or lipids as specified in Claims 1 to 12 of WO2018/078053A1), the disclosure of WO2018/078053A1 hereby incorporated by reference in its entirety. In that context, lipids disclosed in Table 7 of WO2018/078053A1 (e.g. lipids derived from formula I-1 to I-41) and lipids disclosed in Table 8 of WO2018/078053A1 (e.g. lipids derived from formula II-1 to II-36) may be suitably used in the context of the invention. Accordingly, formula I-1 to formula I-41 and formula II-1 to formula II-36 of WO2018/078053A1, and the specific disclosure relating thereto, are herewith incorporated by reference.

[0513] In preferred embodiments, cationic lipids may be derived from formula III of published PCT patent application WO2018/078053A1. Accordingly, formula III of WO2018/078053A1, and the specific disclosure relating thereto, are herewith incorporated by reference.

[0514] In particularly preferred embodiments, the at least one coding RNA or the plurality of coding RNA species of the composition is complexed with one or more lipids thereby forming LNPs, wherein the cationic lipid of the LNP is selected from structures II-1 to III-36 of Table 9 of published PCT patent application WO2018/078053A1. Accordingly, formula III-1 to III-36 of WO2018/078053A1, and the specific disclosure relating thereto, are herewith incorporated by reference.

[0515] In particularly preferred embodiment of the second aspect, the coding RNA or the plurality of coding RNAs is complexed with one or more lipids thereby forming LNPs, wherein the LNPs comprises a cationic lipid according to formula III-3:

[chemical structure]

[0516] In certain embodiments, the cationic lipid as defined herein, more preferably cationic lipid compound III-3, is present in the LNP in an amount from about 30 to about 95 mole percent, relative to the total lipid content of the LNP. If more than one cationic lipid is incorporated within the LNP, such percentages apply to the combined cationic lipids.

[0517] In embodiments, the cationic lipid is present in the LNP in an amount from about 30 to about 70 mole percent. In one embodiment, the cationic lipid is present in the LNP in an amount from about 40 to about 60 mole percent, such as about 40, 41, 42, 43, 44, 45, 46, 47, 48, 49, 50, 51, 52, 53, 54, 55, 56, 57, 58, 59 or 60 mole percent, respectively. In embodiments, the cationic lipid is present in the LNP in an amount from about 47 to about 48 mole percent, such as about 47.0, 47.1, 47.2, 47.3, 47.4, 47.5, 47.6, 47.7, 47.8, 47.9, 50.0 mole percent, respectively, wherein 47.7 mole percent are particularly preferred.

[0518] In some embodiments, the cationic lipid is present in a ratio of from about 20 mol % to about 70 or 75 mol % or from about 45 to about 65 mol % or about 20, 25, 30, 35, 40, 45, 50, 55, 60, 65, or about 70 mol % of the total lipid present in the LNP. In further embodiments, the LNPs comprise from about 25% to about 75% on a molar basis of cationic lipid, e.g., from about 20 to about 70%, from about 35 to about 65%, from about 45 to about 65%, about 60%, about 57.5%, about 57.1%, about 50% or about 40% on a molar basis (based upon 100% total moles of lipid in the lipid nanoparticle). In some embodiments, the ratio of cationic lipid to coding RNA is from about 3 to about 15, such as from about 5 to about 13 or from about 7 to about 11.

[0519] Other suitable (cationic or ionizable) lipids are disclosed in WO2009/086558, WO2009/127060, WO2010/048536, WO2010/054406, WO2010/088537, WO2010/129709, WO2011/153493, WO 2013/063468, US2011/0256175, US2012/0128760, US2012/0027803, U.S. Pat. No. 8,158,601, WO2016/118724, WO2016/118725, WO2017/070613, WO2017/070620, WO2017/099823, WO2012/040184, WO2011/153120, WO2011/149733, WO2011/090965, WO2011/043913, WO2011/022460, WO2012/061259, WO2012/054365, WO2012/044638, WO2010/080724, WO2010/21865, WO2008/103276, WO2013/086373, WO2013/086354, U.S. Pat. Nos. 7,893,302, 7,404,969, 8,283,333, 8,466,122 and 8,569,256 and US Patent Publication No. US2010/0036115, US2012/0202871, US2013/0064894, US2013/0129785, US2013/0150625, US2013/0178541, US2013/0225836, US2014/0039032 and WO2017/112865. In that context, the disclosures of WO2009/086558, WO2009/127060, WO2010/048536, WO2010/054406, WO2010/088537, WO2010/129709, WO2011/153493, WO 2013/063468, US2011/0256175, US2012/0128760, US2012/0027803, U.S. Pat. No. 8,158,601, WO2016/118724, WO2016/118725, WO2017/070613, WO2017/070620, WO2017/099823, WO2012/040184, WO2011/153120, WO2011/149733, WO2011/090965, WO2011/043913, WO2011/022460, WO2012/061259, WO2012/054365, WO2012/044638, WO2010/080724, WO2010/21865, WO2008/103276, WO2013/086373, WO2013/086354, U.S. Pat. Nos. 7,893,302, 7,404,969, 8,283,333, 8,466,122 and 8,569,256 and US Patent Publication No. US2010/0036115, US2012/0202871, US2013/0064894, US2013/0129785, US2013/0150625, US2013/0178541, US2013/0225836 and US2014/0039032 and WO2017/112865 specifically relating to (cationic) lipids suitable for LNPs are incorporated herewith by reference.

[0520] In embodiments, amino or cationic lipids as defined herein have at least one protonatable or deprotonatable group, such that the lipid is positively charged at a pH at or below physiological pH (e.g. pH 7.4), and neutral at a second pH, preferably at or above physiological pH. It will, of course, be understood that the addition or removal of protons as a function of pH is an equilibrium process, and that the reference to a charged or a neutral lipid refers to the nature of the predominant species and does not require that all of lipids have to be present in the charged or neutral form. Lipids having more than one protonatable or deprotonatable group, or which are zwitterionic, are not excluded and may likewise suitable in the context of the present invention. In some embodiments, the protonatable lipids have a pKa of the protonatable group in the range of about 4 to about 11, e.g., a pKa of about 5 to about 7.

[0521] LNPs can comprise two or more (different) cationic lipids as defined herein. Cationic lipids may be selected to contribute to different advantageous properties. For example, cationic lipids that differ in properties such as amine pKa, chemical stability, half-life in circulation, half-life in tissue, net accumulation in tissue, or toxicity can be used in the LNP. In particular, the cationic lipids can be chosen so that the properties of the mixed-LNP are more desirable than the properties of a single-LNP of individual lipids.

[0522] The amount of the permanently cationic lipid or lipidoid may be selected taking the amount of the RNA cargo into account. In one embodiment, these amounts are selected such as to result in an N/P ratio of the nanoparticle(s) or of the composition in the range from about 0.1 to about 20. In this context, the N/P ratio is defined as the mole ratio of the nitrogen atoms (“N”) of the basic nitrogen-containing groups of the lipid or lipidoid to the phosphate groups (“P”) of the RNA which is used as cargo. The N/P ratio may be calculated on the basis that, for example, 1 ug RNA typically contains about 3 nmol phosphate residues, provided that the RNA exhibits a statistical distribution of bases. The “N”-value of the lipid or lipidoid may be calculated on the basis of its molecular weight and the relative content of permanently cationic and—if present—cationisable groups.

[0523] In vivo characteristics and behavior of LNPs can be modified by addition of a hydrophilic polymer coating, e.g. polyethylene glycol (PEG), to the LNP surface to confer steric stabilization. Furthermore, LNPs can be used for specific targeting by attaching ligands (e.g. antibodies, peptides, and carbohydrates) to its surface or to the terminal end of the attached PEG chains (e.g. via PEGylated lipids or PEGylated cholesterol).

[0524] In some embodiments, the LNPs comprise a polymer conjugated lipid. The term “polymer conjugated lipid” refers to a molecule comprising both a lipid portion and a polymer portion. An example of a polymer conjugated lipid is a PEGylated lipid. The term “PEGylated lipid” refers to a molecule comprising both a lipid portion and a polyethylene glycol portion. PEGylated lipids are known in the art and include 1-(monomethoxy-polyethyleneglycol)-2,3-dimyristoylglycerol (PEG-s-DMG) and the like.

[0525] In certain embodiments, the LNP comprises a stabilizing-lipid which is a polyethylene glycol-lipid (PEGylated lipid). Suitable polyethylene glycol-lipids include PEG-modified phosphatidylethanolamine, PEG-modified phosphatidic acid, PEG-modified ceramides (e.g. PEG-CerC14 or PEG-CerC20), PEG-modified dialkylamines, PEG-modified diacylglycerols, PEG-modified dialkylglycerols. Representative polyethylene glycol-lipids include PEG-c-DOMG, PEG-c-DMA, and PEG-s-DMG. In one embodiment, the polyethylene glycol-lipid is N-[(methoxy poly(ethylene glycol)2000)carbamyl]-1,2-dimyristyloxlpropyl-3-amine (PEG-c-DMA). In a preferred embodiment, the polyethylene glycol-lipid is PEG-2000-DMG. In one embodiment, the polyethylene glycol-lipid is PEG-c-DOMG). In other embodiments, the LNPs comprise a PEGylated diacylglycerol (PEG-DAG) such as 1-(monomethoxy-polyethyleneglycol)-2,3-dimyristoylglycerol (PEG-DMG), a PEGylated phosphatidylethanoloamine (PEG-PE), a PEG succinate diacylglycerol (PEG-S-DAG) such as 4-O-(2′,3′-di(tetradecanoyloxy)propyl-1-O-(ω-methoxy(polyethoxy)ethyl)butanedioate (PEG-S-DMG), a PEGylated ceramide (PEG-cer), or a PEG dialkoxypropylcarbamate such as ω-methoxy(polyethoxy)ethyl-N-(2,3di(tetradecanoxy)propyl)carbamate or 2,3-di(tetradecanoxy)propyl-N-(ω-methoxy(polyethoxy)ethyl)carbamate.

[0526] In preferred embodiments, the PEGylated lipid is preferably derived from formula (IV) of published PCT patent application WO2018/078053A1. Accordingly, PEGylated lipids derived from formula (IV) of published PCT patent application WO2018/078053A1, and the respective disclosure relating thereto, are herewith incorporated by reference.

[0527] In a particularly preferred embodiments, the at least one coding RNA of the composition is complexed with one or more lipids thereby forming LNPs, wherein the LNP comprises a PEGylated lipid, wherein the PEG lipid is preferably derived from formula (IVa) of published PCT patent application WO2018/078053A1. Accordingly, PEGylated lipid derived from formula (IVa) of published PCT patent application WO2018/078053A1, and the respective disclosure relating thereto, is herewith incorporated by reference.

[0528] In a particularly preferred embodiment of the second aspect, the coding RNA or the plurality of coding RNA species is complexed with one or more lipids thereby forming lipid nanoparticles (LNP), wherein the LNP comprises a PEGylated lipid/PEG lipid. Preferably, said PEG lipid is of formula (IVa):

[chemical structure]

[0529] wherein n has a mean value ranging from 30 to 60, such as about 30±2, 32±2, 34±2, 36±2, 38±2, 40±2, 42±2, 44±2, 46±2, 48±2, 50±2, 52±2, 54±2, 56±2, 58±2, or 60±2. In a most preferred embodiment n is about 49.

[0530] Further examples of PEG-lipids suitable in that context are provided in US2015/0376115A1 and WO2015/199952, each of which is incorporated by reference in its entirety.

[0531] In some embodiments, LNPs include less than about 3, 2, or 1 mole percent of PEG or PEG-modified lipid, based on the total moles of lipid in the LNP. In further embodiments, LNPs comprise from about 0.1% to about 20% of the PEG-modified lipid on a molar basis, e.g., about 0.5 to about 10%, about 0.5 to about 5%, about 10%, about 5%, about 3.5%, about 3%, about 2.5%, about 2%, about 1.5%, about 1%, about 0.5%, or about 0.3% on a molar basis (based on 100% total moles of lipids in the LNP). In preferred embodiments, LNPs comprise from about 1.0% to about 2.0% of the PEG-modified lipid on a molar basis, e.g., about 1.2 to about 1.9%, about 1.2 to about 1.8%, about 1.3 to about 1.8%, about 1.4 to about 1.8%, about 1.5 to about 1.8%, about 1.6 to about 1.8%, in particular about 1.4%, about 1.5%, about 1.6%, about 1.7%, about 1.8%, about 1.9%, most preferably 1.7% (based on 100% total moles of lipids in the LNP). In various embodiments, the molar ratio of the cationic lipid to the PEGylated lipid ranges from about 100:1 to about 25:1.

[0532] In preferred embodiments, the LNP comprises one or more additional lipids which stabilize the formation of particles during their formation or during the manufacturing process (e.g. neutral lipid and/or one or more steroid or steroid analogue).

[0533] In preferred embodiments of the second aspect, the coding RNA or the plurality of coding RNAs is complexed with one or more lipids thereby forming lipid nanoparticles (LNP), wherein the LNP comprises one or more neutral lipid and/or one or more steroid or steroid analogue.

[0534] Suitable stabilizing lipids include neutral lipids and anionic lipids. The term “neutral lipid” refers to any one of a number of lipid species that exist in either an uncharged or neutral zwitterionic form at physiological pH. Representative neutral lipids include diacylphosphatidylcholines, diacylphosphatidylethanolamines, ceramides, sphingomyelins, dihydro sphingomyelins, cephalins, and cerebrosides.

[0535] In embodiments of the second aspect, the LNP comprises one or more neutral lipids, wherein the neutral lipid is selected from the group comprising distearoylphosphatidylcholine (DSPC), dioleoylphosphatidylcholine (DOPC), dipalmitoylphosphatidylcholine (DPPC), dioleoylphosphatidylglycerol (DOPG), dipalmitoylphosphatidylglycerol (DPPG), dioleoyl-phosphatidylethanolamine (DOPE), palmitoyloleoylphosphatidylcholine (POPC), palmitoyloleoyl-phosphatidylethanolamine (POPE) and dioleoyl-phosphatidylethanolamine 4-(N-maleimidomethyl)-cyclohexane-1carboxylate (DOPE-mal), dipalmitoyl phosphatidyl ethanolamine (DPPE), dimyristoylphosphoethanolamine (DMPE), distearoyl-phosphatidylethanolamine (DSPE), 16-O-monomethyl PE, 16-O-dimethyl PE, 18-1-trans PE, 1-stearioyl-2-oleoylphosphatidyethanol amine (SOPE), and 1,2-dielaidoyl-sn-glycero-3-phophoethanolamine (transDOPE), or mixtures thereof.

[0536] In some embodiments, the LNPs comprise a neutral lipid selected from DSPC, DPPC, DMPC, DOPC, POPC, DOPE and SM. In various embodiments, the molar ratio of the cationic lipid to the neutral lipid ranges from about 2:1 to about 8:1.

[0537] In preferred embodiments, the neutral lipid is 1,2-distearoyl-sn-glycero-3-phosphocholine (DSPC). The molar ratio of the cationic lipid to DSPC may be in the range from about 2:1 to about 8:1.

[0538] In preferred embodiments, the steroid is cholesterol. The molar ratio of the cationic lipid to cholesterol may be in the range from about 2:1 to about 1:1. In some embodiments, the cholesterol may be PEGylated.

[0539] The sterol can be about 10 mol % to about 60 mol % or about 25 mol % to about 40 mol % of the lipid particle. In one embodiment, the sterol is about 10, 15, 20, 25, 30, 35, 40, 45, 50, 55, or about 60 mol % of the total lipid present in the lipid particle. In another embodiment, the LNPs include from about 5% to about 50% on a molar basis of the sterol, e.g., about 15% to about 45%, about 20% to about 40%, about 48%, about 40%, about 38.5%, about 35%, about 34.4%, about 31.5% or about 31% on a molar basis (based upon 100% total moles of lipid in the lipid nanoparticle).

[0540] Preferably, lipid nanoparticles (LNPs) comprise: (a) at least one coding RNA or a plurality of coding RNAs of the first aspect, (b) a cationic lipid, (c) an aggregation reducing agent (such as polyethylene glycol (PEG) lipid or PEG-modified lipid), (d) optionally a non-cationic lipid (such as a neutral lipid), and (e) optionally, a sterol.

[0541] In some embodiments, the cationic lipids (as defined above), non-cationic lipids (as defined above), cholesterol (as defined above), and/or PEG-modified lipids (as defined above) may be combined at various relative molar ratios. For example, the ratio of cationic lipid to non-cationic lipid to cholesterol-based lipid to PEGylated lipid may be between about 30-60:20-35:20-30:1-15, or at a ratio of about 40:30:25:5, 50:25:20:5, 50:27:20:3, 40:30:20:10, 40:32:20:8, 40:32:25:3 or 40:33:25:2, or at a ratio of about 50:25:20:5, 50:20:25:5, 50:27:20:3 40:30:20:10, 40:30:25:5 or 40:32:20:8, 40:32:25:3 or 40:33:25:2, respectively.

[0542] In some embodiments, the LNPs comprise a lipid of formula (III), at least one coding RNA or a plurality of coding RNAs as defined herein, a neutral lipid, a steroid and a PEGylated lipid. In preferred embodiments, the lipid of formula (III) is lipid compound III-3, the neutral lipid is DSPC, the steroid is cholesterol, and the PEGylated lipid is the compound of formula (IVa).

[0543] In a preferred embodiment of the second aspect, the LNP consists essentially of (i) at least one cationic lipid; (ii) a neutral lipid; (iii) a sterol, e.g., cholesterol; and (iv) a PEG-lipid, e.g. PEG-DMG or PEG-cDMA, in a molar ratio of about 20-60% cationic lipid:5-25% neutral lipid:25-55% sterol; 0.5-15% PEG-lipid.

[0544] In particularly preferred embodiments, the coding RNA, or the plurality of coding RNAs is complexed with one or more lipids thereby forming lipid nanoparticles (LNP), wherein the LNP comprises
[0545] (i) at least one cationic lipid as defined herein, preferably a lipid of formula (III), more preferably lipid III-3;
[0546] (ii) at least one neutral lipid as defined herein, preferably 1,2-distearoyl-sn-glycero-3-phosphocholine (DSPC);
[0547] (iii) at least one steroid or steroid analogue as defined herein, preferably cholesterol; and
[0548] (iv) at least one PEG-lipid as defined herein, e.g. PEG-DMG or PEG-cDMA, preferably a PEGylated lipid that is or is derived from formula (iVa).

[0549] In particularly preferred embodiments, the coding RNA, or the plurality of coding RNAs is complexed with one or more lipids thereby forming lipid nanoparticles (LNP), wherein the LNP comprises (i) to (iv) in a molar ratio of about 20-60% cationic lipid:5-25% neutral lipid:25-55% sterol; 0.5-15% PEG-lipid.

[0550] In one preferred embodiment, the lipid nanoparticle comprises: a cationic lipid with formula (III) and/or PEG lipid with formula (IV), optionally a neutral lipid, preferably 1,2-distearoyl-sn-glycero-3-phosphocholine (DSPC) and optionally a steroid, preferably cholesterol, wherein the molar ratio of the cationic lipid to DSPC is optionally in the range from about 2:1 to 8:1, wherein the molar ratio of the cationic lipid to cholesterol is optionally in the range from about 2:1 to 1:1.

[0551] In a particular preferred embodiment, the composition of the second aspect comprising the coding RNA or a plurality of coding RNA species, comprises lipid nanoparticles (LNPs), which have a molar ratio of approximately 50:10:38.5:1.5, preferably 47.5:10:40.8:1.7 or more preferably 47.4:10:40.9:1.7 (i.e. proportion (mol %) of cationic lipid (preferably lipid III-3), DSPC, cholesterol and PEG-lipid (preferably PEG-lipid of formula (IVa) with n=49); solubilized in ethanol).

[0552] The total amount of RNA in the lipid nanoparticles may vary and is defined depending on the e.g. RNA to total lipid w/w ratio. In one embodiment of the invention the RNA to total lipid ratio is less than 0.06 w/w, preferably between 0.03 w/w and 0.04 w/w.

[0553] In some embodiments, the composition comprises lipid nanoparticles (LNPs), which are composed of only three lipid components, namely imidazole cholesterol ester (ICE), 1,2-dioleoyl-sn-glycero-3-phosphoethanolamine (DOPE), and 1,2-dimyristoyl-sn-glycerol, methoxypolyethylene glycol (DMG-PEG-2K).

[0554] In one embodiment, the lipid nanoparticle of the composition comprises a cationic lipid, a steroid; a neutral lipid; and a polymer conjugated lipid, preferably a pegylated lipid. Preferably, the polymer conjugated lipid is a pegylated lipid or PEG-lipid. In a specific embodiment, lipid nanoparticles comprise a cationic lipid resembled by the cationic lipid COATSOME® SS-EC (former name: SS-33/4PE-15; NOF Corporation, Tokyo, Japan), in accordance with the following formula

[chemical structure]

[0555] A described further below, those lipid nanoparticles are termed “GN01”.

[0556] Furthermore, in a specific embodiment, the GN01 lipid nanoparticles comprise a neutral lipid being resembled by the structure 1,2-diphytanoyl-sn-glycero-3-phosphoethanolamine (DPhyPE):

[chemical structure]

[0557] Furthermore, in a specific embodiment, the GN01 lipid nanoparticles comprise a polymer conjugated lipid, preferably a pegylated lipid, being 1,2-dimyristoyl-rac-glycero-3-methoxypolyethylene glycol 2000 (DMG-PEG 2000) having the following structure:

[chemical structure]

[0558] As used in the art, “DMG-PEG 2000” is considered a mixture of 1,2-DMG PEG2000 and 1,3-DMG PEG2000 in ˜97:3 ratio.

[0559] Accordingly, GN01 lipid nanoparticles (GN01-LNPs) according to one of the preferred embodiments comprise a SS-EC cationic lipid, neutral lipid DPhyPE, cholesterol, and the polymer conjugated lipid (pegylated lipid) 1,2-dimyristoyl-rac-glycero-3-methoxypolyethylene glycol (PEG-DMG).

[0560] In a preferred embodiment, the GN01 LNPs comprise:

[0561] (a) cationic lipid SS-EC (former name: SS-33/4PE-15; NOF Corporation, Tokyo, Japan) at an amount of 45-65 mol %;

[0562] (b) cholesterol at an amount of 25-45 mol %;

[0563] (c) DPhyPE at an amount of 8-12 mol %; and

[0564] (d) PEG-DMG 2000 at an amount of 1-3 mol %;

[0565] each amount being relative to the total molar amount of all lipidic excipients of the GN01 lipid nanoparticles.

[0566] In a further preferred embodiment, the GN01 lipid nanoparticles as described herein comprises 59 mol % cationic lipid, 10 mol % neutral lipid, 29.3 mol % steroid and 1.7 mol % polymer conjugated lipid, preferably pegylated lipid. In a most preferred embodiment, the GN01 lipid nanoparticles as described herein comprise 59 mol % cationic lipid SS-EC, 10 mol % DPhyPE, 29.3 mol % cholesterol and 1.7 mol % DMG-PEG 2000.

[0567] The amount of the cationic lipid relative to that of the nucleic acid in the GN01 lipid nanoparticle may also be expressed as a weight ratio (abbreviated f.e. “m/m”). For example, the GN01 lipid nanoparticles comprise the at least one nucleic acid, preferably the at least one RNA at an amount such as to achieve a lipid to RNA weight ratio in the range of about 20 to about 60, or about 10 to about 50. In other embodiments, the ratio of cationic lipid to nucleic acid or RNA is from about 3 to about 15, such as from about 5 to about 13, from about 4 to about 8 or from about 7 to about 11. In a very preferred embodiment of the present invention, the total lipid/RNA mass ratio is about 40 or 40, i.e. about 40 or 40 times mass excess to ensure RNA encapsulation. Another preferred RNA/lipid ratio is between about 1 and about 10, about 2 and about 5, about 2 and about 4, or preferably about 3.

[0568] Further, the amount of the cationic lipid may be selected taking the amount of the nucleic acid cargo such as the RNA compound into account. In one embodiment, the N/P ratio can be in the range of about 1 to about 50. In another embodiment, the range is about 1 to about 20, about 1 to about 10, about 1 to about 5. In one preferred embodiment, these amounts are selected such as to result in an N/P ratio of the GN01 lipid nanoparticles or of the composition in the range from about 10 to about 20. In a further very preferred embodiment, the N/P is 14 (i.e. 14 times mol excess of positive charge to ensure nucleic acid encapsulation).

[0569] In a preferred embodiment, GN01 lipid nanoparticles comprise 59 mol % cationic lipid COATSOME® SS-EC (former name: SS-33/4PE-15 as apparent from the examples section; NOF Corporation, Tokyo, Japan), 29.3 mol % cholesterol as steroid, 10 mol % DPhyPE as neutral lipid/phospholipid and 1.7 mol % DMG-PEG 2000 as polymer conjugated lipid. A further inventive advantage connected with the use of DPhyPE is the high capacity for fusogenicity due to its bulky tails, whereby it is able to fuse at a high level with endosomal lipids. For “GN01”, N/P (lipid to nucleic acid, e.g RNA mol ratio) preferably is 14 and total lipid/RNA mass ratio preferably is 40 (m/m).

[0570] In other embodiments, the at least one nucleic acid (e.g. DNA or RNA), preferably the at least one RNA is complexed with one or more lipids thereby forming lipid nanoparticles (LNP), wherein the LNP comprises
[0571] I at least one cationic lipid;
[0572] Ii at least one neutral lipid;
[0573] Iii at least one steroid or steroid analogue; and
[0574] Iiii at least one PEG-lipid as defined herein,

[0575] wherein the cationic lipid is DLin-KC2-DMA (50 mol %) or DLin-MC3-DMA (50 mol %), the neutral lipid is DSPC (10 mol %), the PEG lipid is PEG-DOMG (1.5 mol %) and the structural lipid is cholesterol (38.5 mol %). In other embodiments, the at least one nucleic acid (e.g. DNA or RNA), preferably the at least one RNA is complexed with one or more lipids thereby forming lipid nanoparticles (LNP), wherein the LNP comprises SS15/Chol/DOPE (or DOPC)/DSG-5000 at mol % 50/38.5/10/1.5.

[0576] In other embodiments, the nucleic acid of the invention may be formulated in liposomes, e.g. in liposomes as described in WO2019/222424, WO2019/226925, WO2019/232095, WO2019/232097, or WO2019/232208, the disclosure of WO2019/222424, WO2019/226925, WO2019/232095, WO2019/232097, or WO2019/232208 relating to liposomes or lipid-based carrier molecules herewith incorporated by reference.

[0577] In various embodiments, the LNP as defined herein have a mean diameter of from about 50 nm to about 200 nm, from about 60 nm to about 200 nm, from about 70 nm to about 200 nm, from about 80 nm to about 200 nm, from about 90 nm to about 200 nm, from about 90 nm to about 190 nm, from about 90 nm to about 180 nm, from about 90 nm to about 170 nm, from about 90 nm to about 160 nm, from about 90 nm to about 150 nm, from about 90 nm to about 140 nm, from about 90 nm to about 130 nm, from about 90 nm to about 120 nm, from about 90 nm to about 100 nm, from about 70 nm to about 90 nm, from about 80 nm to about 90 nm, from about 70 nm to about 80 nm, or about 30 nm, 35 nm, 40 nm, 45 nm, 50 nm, 55 nm, 60 nm, 65 nm, 70 nm, 75 nm, 80 nm, 85 nm, 90 nm, 95 nm, 100 nm, 105 nm, 110 nm, 115 nm, 120 nm, 125 nm, 130 nm, 135 nm, 140 nm, 145 nm, 150 nm, 160 nm, 170 nm, 180 nm, 190 nm, or 200 nm and are substantially non-toxic. As used herein, the mean diameter may be represented by the z-average as determined by dynamic light scattering as commonly known in the art.

[0578] The polydispersity index (PDI) of the nanoparticles is typically in the range of 0.1 to 0.5. In a particular embodiment, a PDI is below 0.2. Typically, the PDI is determined by dynamic light scattering.

[0579] In another preferred embodiment of the invention the lipid nanoparticles have a hydrodynamic diameter in the range from about 50 nm to about 300 nm, or from about 60 nm to about 250 nm, from about 60 nm to about 150 nm, or from about 60 nm to about 120 nm, respectively.

[0580] In another preferred embodiment of the invention the lipid nanoparticles have a hydrodynamic diameter in the range from about 50 nm to about 300 nm, or from about 60 nm to about 250 nm, from about 60 nm to about 150 nm, or from about 60 nm to about 120 nm, respectively.

[0581] In embodiments where more than one or a plurality, e.g. 2, 3, 4, 5, 6, 7, 8, 9, 10, 11, 12, 13, 14, 15 of coding RNA species are comprised in the composition, said more than one or said plurality e.g. 2, 3, 4, 5, 6, 7, 8, 9, 10, 11, 12, 13, 14, 15 of RNA species may be complexed within one or more lipids thereby forming LNPs comprising more than one or a plurality, e.g. 2, 3, 4, 5, 6, 7, 8, 9, 10, 11, 12, 13, 14, 15 of different coding RNA species.

[0582] In embodiments, the LNPs described herein may be lyophilized in order to improve storage stability of the formulation and/or the RNA. In embodiments, the LNPs described herein may be spray dried in order to improve storage stability of the formulation and/or RNA. Lyoprotectants for lyophilization and or spray drying may be selected from trehalose, sucrose, mannose, dextran and inulin. Preferred lyoprotectant is sucrose.

[0583] According to further embodiments, the composition of the second aspect may comprise at least one adjuvant. Suitably, the adjuvant is preferably added to enhance the immunostimulatory properties of the composition.

[0584] The term “adjuvant” as used herein will be recognized and understood by the person of ordinary skill in the art, and is for example intended to refer to a pharmacological and/or immunological agent that may modify, e.g. enhance, the effect of other agents (herein: the effect of the coding RNA) or that may be suitable to support administration and delivery of the composition. The term “adjuvant” refers to a broad spectrum of substances. Typically, these substances are able to increase the immunogenicity of antigens. For example, adjuvants may be recognized by the innate immune systems and, e.g., may elicit an innate immune response (that is, a non-specific immune response). “Adjuvants” typically do not elicit an adaptive immune response. In the context of the invention, adjuvants may enhance the effect of the antigenic peptide or protein provided by the coding RNA. In that context, the at least one adjuvant may be selected from any adjuvant known to a skilled person and suitable for the present case, i.e. supporting the induction of an immune response in a subject, e.g. in a human subject.

[0585] Accordingly, the composition of the second aspect may comprise at least one adjuvant, wherein the at least one adjuvant may be suitably selected from any adjuvant provided in WO2016/203025. Adjuvants disclosed in any of the claims 2 to 17 of WO2016/203025, preferably adjuvants disclosed in claim 17 of WO2016/203025 are particularly suitable, the specific content relating thereto herewith incorporated by reference.

[0586] The composition of the second aspect may comprise, besides the components specified herein, at least one further component which may be selected from the group consisting of further antigens (e.g. in the form of a peptide or protein) or further antigen-encoding nucleic acids; a further immunotherapeutic agent; one or more auxiliary substances (cytokines, such as monokines, lymphokines, interleukins or chemokines); or any further compound, which is known to be immune stimulating due to its binding affinity (as ligands) to human Toll-like receptors; and/or an adjuvant nucleic acid, preferably an immunostimulatory RNA (isRNA), e.g. CpG-RNA etc.

[0587] Rotavirus Vaccine:

[0588] In a third aspect, the present invention provides a Rotavirus vaccine.

[0589] In preferred embodiments of the third aspect, the vaccine comprises at least coding RNA of the first aspect, or the composition of the second aspect.

[0590] Notably, embodiments relating to the composition of the second aspect may likewise be read on and be understood as suitable embodiments of the vaccine of the third aspect. Also, embodiments relating to the vaccine of the third aspect may likewise be read on and be understood as suitable embodiments of the composition of the second aspect (comprising the RNA of the first aspect).

[0591] The term “vaccine” will be recognized and understood by the person of ordinary skill in the art, and is for example intended to be a prophylactic or therapeutic material providing at least one epitope or antigen, preferably an immunogen. In the context of the invention the antigen or antigenic function is provided by the inventive coding RNA of the first aspect (said RNA comprising a coding sequence encoding a antigenic peptide or protein derived from Rotavirus, e.g. VP8*) or the composition of the second aspect (comprising at least one RNA of the first aspect).

[0592] In preferred embodiments of the third aspect, the vaccine of the third aspect, or the composition of the second aspect, elicits an adaptive immune response, preferably an adaptive immune response against a Rotavirus.

[0593] In preferred embodiments of the third aspect, the vaccine of the third aspect, or the composition of the second aspect, induces specific and functional humoral immune response against Rotavirus; and/or broad, functional cellular T-cell responses against Rotavirus.

[0594] In preferred embodiments of the third aspect, the vaccine of the third aspect, or the composition of the second aspect, induces high levels of virus neutralizing antibodies to prevent a Rotavirus infection, preferably high levels of virus neutralizing antibodies against homologous and heterologous Rotavirus strains.

[0595] According to a preferred embodiment of the third aspect, the vaccine as defined herein may further comprise a pharmaceutically acceptable carrier and optionally at least one adjuvant as specified in the context of the second aspect.

[0596] Suitable adjuvants in that context may be selected from adjuvants disclosed in claim 17 of WO2016/203025.

[0597] In a preferred embodiment, the vaccine is a monovalent vaccine.

[0598] In embodiments, the vaccine is a polyvalent vaccine comprising a plurality or at least more than one of the coding RNA species. Embodiments relating to a polyvalent composition as disclosed in the context of the second aspect may likewise be read on and be understood as suitable embodiments of the polyvalent vaccine of the third aspect. In a preferred embodiment, the vaccine is a trivalent vaccine.

[0599] Said trivalent vaccine may suitably comprise one coding RNA species encoding a VP8* antigen construct, wherein the VP8* is or is derived from a Rotavirus A [P4] serotype; one coding RNA species encoding a VP8* antigen construct, wherein the VP8* is or is derived from a Rotavirus A [P6] serotype; one coding RNA species encoding a VP8* antigen construct, wherein the VP8* is or is derived from a Rotavirus A [P8] serotype. Embodiments relating to a trivalent composition as described in the context of the second aspect may likewise be read on and be understood as suitable embodiments of the trivalent vaccine.

[0600] The Rotavirus vaccine typically comprises a safe and effective amount of coding RNA of the first aspect or composition of the second aspect. As used herein, “safe and effective amount” means an amount of coding RNA or composition sufficient to significantly induce a positive modification of a disease or disorder related to an infection with Rotavirus. At the same time, a “safe and effective amount” is small enough to avoid serious side-effects. In relation to coding RNA, composition, or vaccine of the present invention, the expression “safe and effective amount” preferably means an amount of coding RNA, composition, or vaccine that is suitable for stimulating the adaptive immune system against Rotavirus in such a manner that no excessive or damaging immune reactions (e.g. innate immune responses) are achieved.

[0601] A “safe and effective amount” of coding RNA, composition, or vaccine as defined above will vary in connection with the particular condition to be treated and also with the age and physical condition of the patient to be treated, the severity of the condition, the duration of the treatment, the nature of the accompanying therapy, of the particular pharmaceutically acceptable carrier used, and similar factors, within the knowledge and experience of the skilled person. Moreover, the “safe and effective amount” of coding RNA, composition, or vaccine may depend from application/delivery route (intradermal, intramuscular), application device (jet injection, needle injection, microneedle patch) and/or complexation/formulation (protamine complexation or LNP encapsulation). Moreover, the “safe and effective amount” of coding RNA, composition, or vaccine may depend from the physical condition of the treated subject (infant, pregnant women, immunocompromised human subject etc.).

[0602] In some embodiments, the “safe and effective amount” is a dose equivalent to an at least 2-fold, at least 4-fold, at least 10-fold, at least 100-fold, at least 1000-fold reduction in the standard of care dose of a Rotavirus vaccine, wherein the anti-antigenic antibody titer produced in the subject is at least equivalent to an anti-antigenic antibody titer produced in a control subject administered the standard of care dose of a Rotavirus vaccine based on live attenuated Rotavirus vaccine.

[0603] The Rotavirus vaccine can be used according to the invention for human medical purposes and also for veterinary medical purposes (mammals, vertebrates, or avian species).

[0604] The pharmaceutically acceptable carrier as used herein preferably includes the liquid or non-liquid basis of the inventive Rotavirus vaccine. If the inventive vaccine is provided in liquid form, the carrier will be water, typically pyrogen-free water; isotonic saline or buffered (aqueous) solutions, e.g. phosphate, citrate etc. buffered solutions. Preferably, Ringer-Lactate solution is used as a liquid basis for the vaccine or the composition according to the invention as described in WO2006/122828, the disclosure relating to suitable buffered solutions incorporated herewith by reference. Other preferred solutions used as a liquid basis for the vaccine or the composition, in particular for compositions/vaccines comprising LNPs, comprise Sucrose.

[0605] The choice of a pharmaceutically acceptable carrier as defined herein is determined, in principle, by the manner, in which the pharmaceutical composition(s) or vaccine according to the invention is administered. The Rotavirus vaccine is preferably administered locally. Routes for local administration in general include, for example, topical administration routes but also intradermal, transdermal, subcutaneous, or intramuscular injections or intralesional, intracranial, intrapulmonal, intracardial, intraarticular and sublingual injections. More preferably, composition or vaccines according to the present invention may be administered by an intradermal, subcutaneous, or intramuscular route, preferably by injection, which may be needle-free and/or needle injection. Preferred in the context of the invention is intramuscular injection. Compositions/vaccines are therefore preferably formulated in liquid or solid form. The suitable amount of the vaccine or composition according to the invention to be administered can be determined by routine experiments, e.g. by using animal models. Such models include, without implying any limitation, rabbit, sheep, mouse, rat, dog and non-human primate models. Preferred unit dose forms for injection include sterile solutions of water, physiological saline or mixtures thereof. The pH of such solutions should be adjusted to about 7.4.

[0606] The inventive Rotavirus vaccine or composition as defined herein may comprise one or more auxiliary substances or adjuvants as defined above in order to further increase the immunogenicity. A synergistic action of the coding RNA contained in the inventive composition/vaccine and of an auxiliary substance, which may be optionally be co-formulated (or separately formulated) with the inventive vaccine or composition as described above, is preferably achieved thereby. Such immunogenicity increasing agents or compounds may be provided separately (not co-formulated with the inventive vaccine or composition) and administered individually.

[0607] The Rotavirus vaccine is preferably provided in lyophilized or spray-dried form (as described in the context of the second aspect).

[0608] Kit or Kit of Parts, Application, Medical Uses, Method of Treatment:

[0609] In a fourth aspect, the present invention provides a kit or kit of parts suitable for treating or preventing a Rotavirus infection.

[0610] In preferred embodiments, the kit or kit of parts comprises at least one coding RNA of the first aspect, at least one composition of the second aspect (comprising coding RNA), and/or at least one vaccine of the third aspect. In addition, the kit or kit of parts of the fourth aspect may comprise a liquid vehicle for solubilising, and/or technical instructions providing information on administration and dosage of the components.

[0611] The kit may further comprise additional components as described in the context of the composition of the second aspect, and/or the vaccine of the third aspect.

[0612] The technical instructions of said kit may contain information about administration and dosage and patient groups. Such kits, preferably kits of parts, may be applied e.g. for any of the applications or uses mentioned herein, preferably for the use of the coding RNA of the first aspect, the composition of the second aspect, or the vaccine of the third aspect, for the treatment or prophylaxis of an infection or diseases caused by a Rotavirus or disorders related thereto. Preferably, the coding RNA of the first aspect, the composition of the second aspect, or the vaccine of the third aspect is provided in a separate part of the kit, wherein the coding RNA of the first aspect, the composition of the second aspect, or the vaccine of the third aspect is preferably lyophilised. The kit may further contain as a part a vehicle (e.g. buffer solution) for solubilising the coding RNA of the first aspect, the composition of the second aspect, or the vaccine of the third aspect.

[0613] In preferred embodiments, the kit or kit of parts as defined herein comprises Ringer lactate solution.

[0614] Any of the above kits may be used in a treatment or prophylaxis as defined herein. More preferably, any of the above kits may be used as a vaccine, preferably a vaccine against infections caused by a Rotavirus.

[0615] First and Second Medical Use:

[0616] A further aspect relates to the first medical use of the provided coding RNA, composition, vaccine, or kit.

[0617] Accordingly, the invention provides at least one coding RNA as defined in the first aspect for use as a medicament, the composition as defined in the second aspect for use as a medicament, the Rotavirus vaccine as defined in the third aspect for use as a medicament, and the kit or kit of parts as defined in the third aspect for use as a medicament.

[0618] The present invention furthermore provides several applications and uses of the coding RNA, the composition, the vaccine, or the kit or kit of parts.

[0619] In particular, said coding RNA, composition, vaccine, or the kit or kit of parts may be used for human medical purposes and also for veterinary medical purposes, preferably for human medical purposes.

[0620] In particular, said coding RNA, composition, vaccine, or the kit or kit of parts is for use as a medicament for human medical purposes, wherein said RNA, composition, vaccine, or the kit or kit of parts may be particularly suitable for young infants, newborns, immunocompromised recipients, as well as pregnant and breast-feeding women and elderly people. Said coding RNA, composition, vaccine, or the kit or kit of parts is for use as a medicament for human medical purposes, wherein said RNA, composition, vaccine, or the kit or kit of parts may be particularly suitable for intramuscular injection.

[0621] In yet another aspect, the invention relates to the second medical use of the provided coding RNA, composition, vaccine, or kit.

[0622] Accordingly, the invention provides at least one coding RNA as defined in the first aspect, for use in the treatment or prophylaxis of an infection with a Rotavirus, or a disorder related to such an infection, the composition as defined in the second aspect, for use in the treatment or prophylaxis of an infection with a Rotavirus, or a disorder related to such an infection, the Rotavirus vaccine as defined in the third aspect, for use in the treatment or prophylaxis of an infection with a Rotavirus or a disorder related to such an infection, and the kit or kit of parts as defined in the third aspect, for use in the treatment or prophylaxis of an infection with a Rotavirus, or a disorder related to such an infection.

[0623] In embodiments, the coding RNA of the first aspect, the composition of the second aspect, the vaccine of the third aspect, or the kit or kit of parts of the fourth aspect is for use in the treatment or prophylaxis of an infection with a Rotavirus, preferably with Rotavirus A, in particular Rotavirus A of serotypes [P4], [P6], and/or [P8], preferably derived from RVA/BE1058/P[4], RVA/F01322/P[6], RVA/BE1128/P[8] and/or RVA/Wa-VirWa/P[8].

[0624] In preferred embodiments, the composition of the second aspect, the vaccine of the third aspect, or the kit or kit of parts of the fourth aspect is for use in the treatment or prophylaxis of an infection with Rotavirus, wherein administration of said composition, vaccine, or kit provides protection against three different Rotavirus A serotypes [P4], [P6], [P8] (e.g. when administered as a trivalent composition or vaccine as defined herein).

[0625] As used herein, “a disorder related to a Rotavirus infection” may preferably comprise a typical symptom or a complication of a Rotavirus infection, including gastrointestinal complications/symptoms or fewer etc.

[0626] Particularly, the coding RNA of the first aspect, the composition of the second aspect, the vaccine of the third aspect, or the kit or kit of parts of the fourth aspect may be used in a method of prophylactic (pre-exposure prophylaxis or post-exposure prophylaxis) and/or therapeutic treatment of infections caused by a Rotavirus.

[0627] The coding RNA, the composition or the vaccine may preferably be administered locally. In particular, composition or vaccines may be administered by an intradermal, subcutaneous, intranasal, or intramuscular route. In embodiments, the inventive coding RNA, composition, vaccine may be administered by conventional needle injection or needle-free jet injection. Preferred in that context is intramuscular injection.

[0628] In embodiments, the coding RNA as comprised in a composition or vaccine as defined herein is provided in an amount of about 100 ng to about 500 ug, in an amount of about 1 ug to about 200 ug, in an amount of about 1 ug to about 100 ug, in an amount of about 5 ug to about 100 ug, preferably in an amount of about 10 ug to about 50 ug, specifically, in an amount of about 5 ug, 10 ug, 15 ug, 20 ug, 25 ug, 30 ug, 35 ug, 40 ug, 45 ug, 50 ug, 55 ug, 60 ug, 65 ug, 70 ug, 75 ug, 80 ug, 85 ug, 90 ug, 95 ug or 100 ug.

[0629] In some embodiments, the vaccine comprising the coding RNA, or the composition comprising the coding RNA is formulated in an effective amount to produce an antigen specific immune response in a subject. In some embodiments, the effective amount is a total dose of 1 ug to 200 ug, 1 ug to 100 ug, or 5 ug to 100 ug.

[0630] In some embodiments, the subject is about 5 years old or younger. For example, the subject may be between the ages of about 1 year and about 5 years (e.g., about 1, 2, 3, 4 or 5 years), or between the ages of about 6 months and about 1 year (e.g., about 6, 7, 8, 9, 10, 11 or 12 months). In some embodiments, the subject is about 12 months or younger (e.g., 12, 11, 10, 9, 8, 7, 6, 5, 4, 3, 2 months or 1 month). In some embodiments, the subject is about 6 months or younger.

[0631] In one embodiment, the immunization protocol for the treatment or prophylaxis of a subject against Rotavirus comprises one single doses of the composition or the vaccine.

[0632] In some embodiments, the effective amount is a dose of 5 ug administered to the subject in one vaccination. In some embodiments, the effective amount is a dose of 10 ug administered to the subject in one vaccination. In some embodiments, the effective amount is a dose of 20 ug administered to the subject in one vaccination. In some embodiments, the effective amount is a dose of 30 ug administered to the subject in one vaccination. In some embodiments, the effective amount is a dose of 40 ug administered to the subject in one vaccination. In some embodiments, the effective amount is a dose of 50 ug administered to the subject in one vaccination. In some embodiments, the effective amount is a dose of 100 ug administered to the subject in one vaccination. In some embodiments, the effective amount is a dose of 200 ug administered to the subject in one vaccination.

[0633] In preferred embodiments, the immunization protocol for the treatment or prophylaxis of a Rotavirus infection comprises a series of single doses or dosages of the composition or the vaccine. A single dosage, as used herein, refers to the initial/first dose, a second dose or any further doses, respectively, which are preferably administered in order to “boost” the immune reaction.

[0634] In some embodiments, the effective amount is a dose of 5 ug administered to the subject a total of two times. In some embodiments, the effective amount is a dose of 10 ug administered to the subject a total of two times. In some embodiments, the effective amount is a dose of 20 ug administered to the subject a total of two times. In some embodiments, the effective amount is a dose of 30 ug administered to the subject a total of two times. In some embodiments, the effective amount is a dose of 40 ug administered to the subject a total of two times. In some embodiments, the effective amount is a dose of 50 ug administered to the subject a total of two times. In some embodiments, the effective amount is a dose of 100 ug administered to the subject a total of two times. In some embodiments, the effective amount is a dose of 200 ug administered to the subject a total of two times.

[0635] In preferred embodiments, the vaccine/composition immunizes the subject against a Rotavirus infection (upon administration as defined herein) for at least 1 year, preferably at least 2 years. In preferred embodiments, the vaccine/composition immunizes the subject against a Rotavirus infection for more than 2 years, more preferably for more than 3 years, even more preferably for more than 4 years, even more preferably for more than 5-10 years.

[0636] Method of Treatment and Use, Diagnostic Method and Use:

[0637] In another aspect, the present invention relates to a method of treating or preventing a disorder.

[0638] In preferred embodiments, the present invention relates to a method of treating or preventing a disorder, wherein the method comprises applying or administering to a subject in need thereof at least one coding RNA of the first aspect, the composition of the second aspect, the vaccine of the third aspect, or the kit or kit of parts of the fourth aspect.

[0639] In preferred embodiments, the disorder is an infection with a Rotavirus, or a disorder related to such infections, in particular an infection with Rotavirus A, or a disorder related to such infections. In particular, the disorder is an infection with Rotavirus A serotypes [P4], [P6], and/or [P8].

[0640] In preferred embodiments, the present invention relates to a method of treating or preventing a disorder as defined above, wherein the method comprises applying or administering to a subject in need thereof at least one coding RNA of the first aspect, the composition of the second aspect, the vaccine of the third aspect, or the kit or kit of parts of the fourth aspect, wherein the subject in need is preferably a mammalian subject.

[0641] In particularly preferred embodiments, the subject in need is a mammalian subject, preferably a human subject. Suitably, the human subject may is an infant, a newborn, a pregnant women, a breast-feeding woman, an elderly, or an immunocompromised human subject. Most preferably, the human subject is an infant or a newborn. For example, the infant human subject may be between the ages of about 1 year and about 5 years (e.g., about 1, 2, 3, 4 or 5 years), or the newborn human subject may be between the ages of about 6 months and about 1 year (e.g., about 6, 7, 8, 9, 10, 11 or 12 months). In some embodiments, the newborn human subject is younger than about 6 months,

[0642] In particular, such the method of treatment may comprise the steps of:
[0643] a) providing at least one coding RNA of the first aspect, at least one composition of the second aspect, at least one vaccine of the third aspect, or the kit or kit of parts of the fourth aspect;
[0644] b) applying or administering said RNA, composition, vaccine, or kit or kit of parts to a subject as a first dose
[0645] c) optionally, applying or administering said RNA, composition, vaccine, or kit or kit of parts to a subject as a second dose or a further dose, preferably at least 3, 4, 5, 6, 7, 8, 9, 10, 11, 12, months after the first dose.

[0646] The first dosage, as used herein, refers to the initial/first dose, a second dose or any further doses, respectively, which are preferably administered in order to “boost” the immune reaction.

[0647] According to a further aspect, the present invention also provides a method for expression of at least one polypeptide comprising at least one peptide or protein derived from a Rotavirus, or a fragment or variant thereof, wherein the method preferably comprises the following steps:

[0648] a) providing at least one coding RNA of the first aspect or at least one composition of the second aspect; and

[0649] b) applying or administering said RNA or composition to an expression system (cells), a tissue, an organism.

[0650] The method for expression may be applied for laboratory, for research, for diagnostic, for commercial production of peptides or proteins and/or for therapeutic purposes. The method may furthermore be carried out in the context of the treatment of a specific disease, particularly in the treatment of infectious diseases, particularly Rotavirus infections.

[0651] Likewise, according to another aspect, the present invention also provides the use of the coding RNA of the first aspect, the composition of the second aspect, the vaccine of the third aspect, or the kit or kit of parts of the fourth aspect preferably for diagnostic or therapeutic purposes, e.g. for expression of an encoded Rotavirus antigenic peptide or protein, e.g. by applying or administering said coding RNA, composition comprising said coding RNA, vaccine comprising said coding RNA, e.g. to a cell-free expression system, a cell (e.g. an expression host cell or a somatic cell), a tissue or an organism. In specific embodiments, applying or administering said coding RNA, composition comprising said coding RNA, vaccine comprising said coding RNA to a tissue or an organism may be followed by e.g. a step of obtaining induced Rotavirus antibodies e.g. Rotavirus specific (monoclonal) antibodies or a step of obtaining generated Rotavirus VP8* protein constructs.

[0652] The use may be applied for a (diagnostic) laboratory, for research, for diagnostics, for commercial production of peptides, proteins, or Rotavirus antibodies and/or for therapeutic purposes. The use may be carried out in vitro, in vivo or ex vivo. The use may furthermore be carried out in the context of the treatment of a specific disease, particularly in the treatment of a Rotavirus infection or a related disorder.

[0653] According to a further aspect, the present invention also provides a method of manufacturing a composition or a Rotavirus vaccine, comprising the steps of:
[0654] a) RNA in vitro transcription step using a DNA template in the presence of a trinucleotide cap analogue to obtain cap1 comprising coding RNA, preferably as provided in Table 4;
[0655] b) Purifying the obtained cap1 comprising coding RNA of step a) using RP-HPLC, and/or TFF, and/or Oligo(dT) purification and/or AEX, preferably using RP-HPLC;
[0656] c) Providing a first liquid composition comprising the purified cap1 comprising coding RNA of step b);
[0657] d) Providing a second liquid composition comprising at least one cationic lipid as defined herein, a neutral lipid as defined herein, a steroid or steroid analogue as defined herein, and a PEG-lipid as defined herein;
[0658] e) Introducing the first liquid composition and the second liquid composition into at least one mixing means to allow the formation of LNPs comprising cap1 comprising coding RNA;
[0659] f) Purifying the obtained LNPs comprising cap1 comprising coding RNA;
[0660] g) optionally, lyophilizing the purified LNPs comprising cap1 comprising coding RNA.

[0661] Preferably, the mixing means of step e) is a T-piece connector or a microfluidic mixing device. Preferably, the purifying step f) comprises at least one step selected from precipitation step, dialysis step, filtration step, TFF step. Optionally, an enzymatic polyadenylation step may be performed after step a) or b). Optionally, further purification steps may be implemented to e.g. remove residual DNA, buffers, small RNA by-products etc. Optionally, RNA in vitro transcription is performed in the absence of a cap analog, and an enzymatic capping step is performed after RNA vitro transcription. Optionally, RNA in vitro transcription is performed in the presence of at least one modified nucleotide as defined herein.

### LIST OF PREFERRED EMBODIMENTS/ITEMS

[0662] In the following, particularly preferred embodiments (items 1-64) of the invention are provided.

[0663] Item 1:

[0664] A coding RNA for a Rotavirus vaccine comprising
[0665] a) at least one heterologous 5′ untranslated region (5′-UTR) and/or at least one heterologous 3′ untranslated region (3′-UTR); and
[0666] b) at least one coding sequence operably linked to said 3′-UTR and/or 5′-UTR encoding at least one antigenic protein of a Rotavirus, wherein said antigenic protein is or is derived from VP8* or an immunogenic fragment or immunogenic variant thereof.

[0667] Item 2:

[0668] Coding RNA of item 1, wherein the Rotavirus is selected from species A, B or C, preferably wherein the Rotavirus is Rotavirus A.

[0669] Item 3:

[0670] Coding RNA of claim 1 or 2, wherein the Rotavirus is selected from the G-serotypes or P-serotypes G1, G2, G3, G4, G9, G12, P[4], P[6] or P[8].

[0671] Item 4:

[0672] Coding RNA of any one of the preceding items, wherein the Rotavirus is a Rotavirus A selected from the P serotypes P[4], P[6] or P[8]

[0673] Item 5

[0674] Coding RNA of any one of the preceding items, wherein the Rotavirus is a Rotavirus A selected from Human rotavirus A BE1058 (RVA/Human-wt/BEL/BE1058/2008/G2P[4], G2P[4], JN849123.1, GI:371455744, AEX30665.1, acronym: RVA/BE1058/P[4]), Human rotavirus A F01322 (Hu/BEL/F01322/2009/G3P[6], G3P[6], JF460826.1. GI: 37531451, AFA51886.1, acronym: RVA/F01322/P[6]), Human rotavirus A BE1128 (RVA/Human-wt/BEL/BE1128/2009/G1P[8], G1P[8], JN849135.1. GI: 371455756, AEX30671, acronym: RVA/BE1128/P[8]), or Human rotavirus A WA-VirWa (Wa variant VirWa, G1P[8], ACR22783.1, GI: 237846292, FJ423116, acronym: RVA/Wa-VirWa/P[8]).

[0675] Item 6:

[0676] Coding RNA of any one of the preceding items, wherein the VP8* is a full length VP8* protein having an amino acid sequence comprising or consisting of amino acid 1 to amino acid 240, or a fragment of a VP8* protein.

[0677] Item 7:

[0678] Coding RNA of any one of items 6, wherein the fragment of a VP8* comprises the lectin domain and lacks the N-terminal alpha helix-domain, wherein the fragment has preferably an amino acid sequence comprising or consisting of amino acid 41 to amino acid 223, or amino acid 65 to amino acid 223 (of a corresponding full length VP8*).

[0679] Item 8:

[0680] Coding RNA of any one of the preceding items, wherein the amino acid sequences of the at least one antigenic protein derived from VP8* is mutated to delete at least one predicted or potential glycosylation site.

[0681] Item 9:

[0682] Coding RNA of any one of the preceding items, wherein the amino acid sequences of the at least one antigenic protein derived from VP8* is mutated to delete all predicted or potential glycosylation sites.

[0683] Item 10:

[0684] Coding RNA of any one of the preceding items, wherein the at least one coding sequence encodes at least one of the amino acid sequences being identical or at least 70%, 80%, 85%, 86%, 87%, 88%, 89%, 90%, 91%, 92%, 93%, 94%, 95%, 96%, 97%, 98%, or 99% identical to any one of SEQ ID NOs: 19-45, or an immunogenic fragment or immunogenic variant of any of these.

[0685] Item 11:

[0686] Coding RNA of any one of the preceding items, wherein the at least one coding sequence additionally encodes one or more heterologous peptide or protein elements selected from a signal peptide, a linker, a helper epitope, an antigen clustering domain, or a transmembrane domain.

[0687] Item 12:

[0688] Coding RNA of item 11, wherein the signal peptide is or is derived from HsPLAT, HsALB, IgE, wherein the amino acid sequences of said heterologous signal peptides is identical or at least 70%, 80%, 85%, 86%, 87%, 88%, 89%, 90%, 91%, 92%, 93%, 94%, 95%, 96%, 97%, 98%, or 99% identical to any one of amino acid sequences SEQ ID NOs: 1738-1740, or fragment or variant of any of these.

[0689] Item 13:

[0690] Coding RNA of item 11, wherein the helper epitope is or is derived from P2, wherein the amino acid sequences of said helper epitopes is identical or at least 70%, 80%, 85%, 86%, 87%, 88%, 89%, 90%, 91%, 92%, 93%, 94%, 95%, 96%, 97%, 98%, or 99% identical to amino acid sequence SEQ ID NOs: 1750 or fragment or variant of any of these.

[0691] Item 14:

[0692] Coding RNA of item 11, wherein the antigen clustering domain is or is derived from ferritin or lumazine-synthase, wherein the amino acid sequences of said antigen clustering domain is identical or at least 70%, 80%, 85%, 86%, 87%, 88%, 89%, 90%, 91%, 92%, 93%, 94%, 95%, 96%, 97%, 98%, or 99% identical to any one of amino acid sequences SEQ ID NOs: 1759, 1764, or fragment or variant of any of these.

[0693] Item 15:

[0694] Coding RNA of item 11, wherein the transmembrane domain is or is derived from an influenza HA transmembrane domain, preferably derived from an influenza A HA H1N1, more preferably from H1N1/A/Netherlands/602/2009, TM domain_HA, aa521-566, NCBI Acc. No.: ACQ45338.1, CY039527.1) or fragment or variant thereof.

[0695] Item 16:

[0696] Coding RNA of any one of the preceding items, wherein the at least one coding sequence encodes the following elements preferably in N-terminal to C-terminal direction:

[0697] a) helper epitope, VP8*protein or VP8*fragment; or

[0698] b) helper epitope, VP8*protein or VP8*fragment; antigen clustering domain; or

[0699] c) Signal peptide, helper epitope, VP8*protein or fragment thereof; or

[0700] d) Signal peptide, helper epitope, VP8*protein or VP8*fragment, antigen clustering domain; or

[0701] e) Signal peptide, helper epitope, VP8*protein or VP8*fragment, transmembrane domain; or

[0702] f) antigen clustering domain, helper epitope; VP8*protein or VP8*fragment.

[0703] Item 17:

[0704] Coding RNA of any one of the preceding items, wherein the at least one coding sequence encodes at least one of the amino acid sequences being identical or at least 70%, 80%, 85%, 86%, 87%, 88%, 89%, 90%, 91%, 92%, 93%, 94%, 95%, 96%, 97%, 98%, or 99% identical to any one of SEQ ID NOs: 1-6, 46-117, 1899, 1900, or an immunogenic fragment or immunogenic variant of any of these.

[0705] Item 18:

[0706] Coding RNA of item 17, wherein the at least one coding sequence encodes at least one of the amino acid sequences being identical or at least 70%, 80%, 85%, 86%, 87%, 88%, 89%, 90%, 91%, 92%, 93%, 94%, 95%, 96%, 97%, 98%, or 99% identical to any one of SEQ ID NOs: 1-3, 4-6, 46-54, 64-72, 91-99, 109-117, or an immunogenic fragment or immunogenic variant of any of these.

[0707] Item 19:

[0708] Coding RNA of any one of the preceding items, wherein the at least one coding sequence comprises a codon modified coding sequence comprising or consisting of a nucleic acid sequence being identical or at least 70%, 80%, 85%, 86%, 87%, 88%, 89%, 90%, 91%, 92%, 93%, 94%, 95%, 96%, 97%, 98%, or 99% identical to any one SEQ ID NOs: 190-261, 298-369, 406-477, 514-585, 1901-1906, or a fragment or variant of any of these sequences.

[0709] Item 20:

[0710] Coding RNA of any one of the preceding items, wherein the at least one coding sequence comprises at least one modified nucleotide selected from pseudouridine (ψ) and N1-methylpseudouridine (m1ψ), preferably wherein all uracil nucleotides are replaced by pseudouridine (ψ) nucleotides and/or N1-methylpseudouridine (m1ψ) nucleotides.

[0711] Item 21:

[0712] Coding RNA of any one of the preceding items, wherein the at least one coding sequence is a codon modified coding sequence, wherein the amino acid sequence encoded by the at least one codon modified coding sequence is preferably not being modified compared to the amino acid sequence encoded by the corresponding wild type coding sequence.

[0713] Item 22:

[0714] Coding RNA according to item 21, wherein the at least one codon modified coding sequence is selected from C maximized coding sequence, CAI maximized coding sequence, human codon usage adapted coding sequence, G/C content modified coding sequence, and G/C optimized coding sequence, or any combination thereof.

[0715] Item 23:

[0716] Coding RNA of item 21 or 22, wherein the at least one coding sequence comprises or consists of a codon modified coding sequence comprising or consisting of a nucleic acid sequence being identical or at least 70%, 80%, 85%, 86%, 87%, 88%, 89%, 90%, 91%, 92%, 93%, 94%, 95%, 96%, 97%, 98%, or 99% identical to any one SEQ ID NOs: 154-585, 1901-1906 or a fragment or variant of any of these sequences.

[0717] Item 24:

[0718] Coding RNA of any one of items 21 to 23, wherein the at least one coding sequence comprises or consists of a codon modified coding sequence comprising or consisting of a nucleic acid sequence being identical or at least 70%, 80%, 85%, 86%, 87%, 88%, 89%, 90%, 91%, 92%, 93%, 94%, 95%, 96%, 97%, 98%, or 99% identical to any one of SEQ ID NOs: 190-198, 208-216, 235-243, 253-261, 298-306, 316-324, 343-351, 361-369, 1901-1906 or a fragment or variant of any of these sequences.

[0719] Item 25:

[0720] Coding RNA of any one of the preceding items, wherein the coding RNA is an mRNA, a self-replicating RNA, a circular RNA, a viral RNA, or a replicon RNA.

[0721] Item 26:

[0722] Coding RNA of any one of the preceding items, wherein the coding RNA is an mRNA.

[0723] Item 27:

[0724] Coding RNA of any one of the preceding items, wherein the coding RNA comprises a 5′-cap structure, preferably cap0, cap1, cap2, a modified cap0 or a modified cap1 structure.

[0725] Item 28:

[0726] Coding RNA of item 27, wherein the 5′-cap structure is a cap1 structure.

[0727] Item 29:

[0728] Coding RNA of any one of the preceding items, wherein the coding RNA comprises a cap1 structure, wherein said cap1 structure is obtainable by co-transcriptional capping preferably using a trinucleotide cap1 analogue.

[0729] Item 30:

[0730] Coding RNA of any one of item 27 to 29, wherein about 70%, 75%, 80%, 85%, 90%, 95% of the coding RNA (species) comprises a cap1 structure as determined using a capping assay.

[0731] Item 31:

[0732] Coding RNA of any one of the preceding items, wherein the coding RNA comprises at least one poly(A) sequence comprising about 30 to about 200 adenosine nucleotides, preferably comprising about 100 adenosine nucleotides.

[0733] Item 32:

[0734] Coding RNA of item 31, wherein the at least one poly(A) sequence is located at the 3′ terminus, preferably wherein the 3′-terminal nucleotide of the coding RNA is the 3-terminal A nucleotide of the poly(A) sequence.

[0735] Item 33:

[0736] Coding RNA of any one of the preceding items, wherein the coding RNA comprises a cap1 structure as defined in items 27 to 30 and at least one poly(A) sequence as defined in items 31 to 32.

[0737] Item 34:

[0738] Coding RNA of any one of the preceding items, wherein the RNA comprises at least one histone stem-loop, wherein the histone stem-loop preferably comprises or consists of a nucleic acid sequence identical or at least 70%, 80%, 90%, 91%, 92%, 93%, 94%, 95%, 96%, 97%, 98%, or 99% identical to SEQ ID NOs: 1819 or 1820, or fragments or variants thereof.

[0739] Item 35:

[0740] Coding RNA of any one of the preceding items, wherein the RNA comprises at least one 3′-terminal sequence element comprising or consisting of a nucleic acid sequence being identical or at least 70%, 80%, 90%, 91%, 92%, 93%, 94%, 95%, 96%, 97%, 98%, or 99% identical to SEQ ID NOs: 1825-1856, or a fragment or variant thereof.

[0741] Item 36:

[0742] Coding RNA of any one of the preceding items, wherein the at least one heterologous 3′-UTR comprises or consisting of a nucleic acid sequence derived from a 3′-UTR of a gene selected from PSMB3, alpha-globin, ALB7, CASP1, COX6B1, GNAS, NDUFA1 and RPS9, or from a homolog, a fragment or a variant of any one of these genes.

[0743] Item 37:

[0744] Coding RNA of any one of the preceding items, wherein the at least one heterologous 5′-UTR comprises or consisting of a nucleic acid sequence derived from a 5′-UTR of a gene selected from HSD17B4, RPL32, ASAH1, ATP5A1, MP68, NDUFA4, NOSIP, RPL31, SLC7A3, TUBB4B and UBQLN2, or from a homolog, a fragment or variant of any one of these genes.

[0745] Item 38:

[0746] Coding RNA of any one of the preceding items, wherein
[0747] the at least one heterologous 5′-UTR is derived from a 5′-UTR of a HSD17B4 gene, or from a corresponding RNA sequence, homolog, fragment or variant thereof and the at least one 3′-UTR is derived from a 3′-UTR of a PSMB3 gene, or from a corresponding RNA sequence, homolog, fragment or variant thereof, preferably wherein said 5′-UTR comprises or consists of a nucleic acid sequence being identical or at least 70%, 80%, 85%, 86%, 87%, 88%, 89%, 90%, 91%, 92%, 93%, 94%, 95%, 96%, 97%, 98%, or 99% identical to SEQ ID NOs: 1781 or 1782 or a fragment or a variant thereof, and wherein said 3′-UTR comprises or consists of a nucleic acid sequence being identical or at least 70%, 80%, 85%, 86%, 87%, 88%, 89%, 90%, 91%, 92%, 93%, 94%, 95%, 96%, 97%, 98%, or 99% identical to SEQ ID NOs: 1803 or 1804 or a fragment or a variant thereof; or
[0748] the at least one heterologous 3′-UTR is derived from a 3′-UTR of an alpha-globin gene, or from a corresponding RNA sequence, homolog, fragment or variant thereof, preferably wherein said 3-UTR comprises or consists of a nucleic acid sequence being identical or at least 70%, 80%, 85%, 86%, 87%, 88%, 89%, 90%, 91%, 92%, 93%, 94%, 95%, 96%, 97%, 98%, or 99% identical to SEQ ID NOs: 1817 or 1818 or a fragment or a variant thereof.

[0749] Item 39:

[0750] Coding RNA of any one of the preceding items, wherein the coding RNA comprises or consists of an RNA sequence which is identical or at least 70%0, 80%, 85%, 86%, 87%, 88%, 89%, 90%, 91%, 92%, 93%, 94%, 95%, 96%, 97%, 98%, or 99% identical to a nucleic acid sequence selected from the group consisting of SEQ ID NOs: 586-1737, 1862-1882, 1885-1898, 1907-1930 or a fragment or variant of any of these sequences.

[0751] Item 40:

[0752] Coding RNA of item 39, wherein the coding RNA comprises or consists of an RNA sequence which is identical or at least 70%, 80%, 85%, 86%, 87%, 88%, 89%, 90%, 91%, 92%, 93%, 94%, 95%, 96%, 97%, 98%, or 99% identical to a nucleic acid sequence selected from the group consisting of SEQ ID NOs: 586-594, 604-612, 631-639, 649-666, 676-684, 703-711, 721-738, 748-756, 775-783, 793-810, 820-828, 847-855, 865-882, 892-900, 919-927, 937-954, 964-972, 991-999, 1009-1026, 1036-1044, 1063-1071, 1081-1098, 1108-1116, 1135-1143, 1153-1170, 1180-1188, 1207-1215, 1225-1242, 1252-1260, 1279-1287, 1297-1314, 1324-1332, 1351-1359, 1369-1386, 1396-1404, 1423-1431, 1441-1458, 1468-1476, 1495-1503, 1513-1530, 1540-1548, 1567-1575, 1585-1602, 1612-1620, 1639-1647, 1657-1674, 1684-1692, 1711-1719, 1729-1737, 1862-1870, 1872-1877, 1885, 1898, 1907-1930, or a fragment or variant of any of these sequences.

[0753] Item 41:

[0754] A composition comprising at least one coding RNA as defined in any one of items 1 to 40, wherein the composition optionally comprises at least one pharmaceutically acceptable carrier or excipient.

[0755] Item 42:

[0756] Composition of item 41, wherein the composition comprises more than one or a plurality, preferably 2, 3, 4, 5, 6, 7, 8, 9, or 10 different coding RNAs each defined in any one of items 1 to 40.

[0757] Item 43:

[0758] Composition of item 42, wherein the composition comprises
[0759] (i) at least one coding RNA encoding at least one antigenic protein that is or is derived from VP8* of a Rotavirus A from a P[4] serotype, preferably according to SEQ ID NOs: 586-588, 595-597, 604-606, 613-615, 622-624, 631-633, 640-642, 649-651, 658-660, 667-669, 676-678, 685-687, 694-696, 703-705, 712-714, 721-723, 730-732, 739-741, 748-750, 757-759, 766-768, 775-777, 784-786, 793-795, 802-804, 811-813, 820-822, 829-831, 838-840, 847-849, 856-858, 865-867, 874-876, 883-885, 892-894, 901-903, 910-912, 919-921, 928-930, 937-939, 946-948, 955-957, 964-966, 973-975, 982-984, 991-993, 1000-1002, 1009-1011, 1018-1020, 1027-1029, 1036-1038, 1045-1047, 1054-1056, 1063-1065, 1072-1074, 1081-1083, 1090-1092, 1099-1101, 1108-1110, 1117-1119, 1126-1128, 1135-1137, 1144-1146, 1153-1155, 1162-1164, 1171-1173, 1180-1182, 1189-1191, 1198-1200, 1207-1209, 1216-1218, 1225-1227, 1234-1236, 1243-1245, 1252-1254, 1261-1263, 1270-1272, 1279-1281, 1288-1290, 1297-1299, 1306-1308, 1315-1317, 1324-1326, 1333-1335, 1342-1344, 1351-1353, 1360-1362, 1369-1371, 1378-1380, 1387-1389, 1396-1398, 1405-1407, 1414-1416, 1423-1425, 1432-1434, 1441-1443, 1450-1452, 1459-1461, 1468-1470, 1477-1479, 1486-1488, 1495-1497, 1504-1506, 1513-1515, 1522-1524, 1531-1533, 1540-1542, 1549-1551, 1558-1560, 1567-1569, 1576-1578, 1585-1587, 1594-1596, 1603-1605, 1612-1614, 1621-1623, 1630-1632, 1639-1641, 1648-1650, 1657-1659, 1666-1668, 1675-1677, 1684-1686, 1693-1695, 1702-1704, 1711-1713, 1720-1722, 1729-1731, 1886, 1907, 1909, 1911, 1913, 1915, 1917, 1919, 1921, 1923, 1925, 1927, 1929 or fragments or variants thereof; and
[0760] (ii) at least one coding RNA encoding at least one antigenic protein that is or is derived from VP8* of a Rotavirus A from a P[6] serotype, preferably according to SEQ ID NOs: 589, 590, 598, 599, 607, 608, 616, 617, 625, 626, 634, 635, 643, 644, 652, 653, 661, 662, 670, 671, 679, 680, 688, 689, 697, 698, 706, 707, 715, 716, 724, 725, 733, 734, 742, 743, 751, 752, 760, 761, 769, 770, 778, 779, 787, 788, 796, 797, 805, 806, 814, 815, 823, 824, 832, 833, 841, 842, 850, 851, 859, 860, 868, 869, 877, 878, 886, 887, 895, 896, 904, 905, 913, 914, 922, 923, 931, 932, 940, 941, 949, 950, 958, 959, 967, 968, 976, 977, 985, 986, 994, 995, 1003, 1004, 1012, 1013, 1021, 1022, 1030, 1031, 1039, 1040, 1048, 1049, 1057, 1058, 1066, 1067, 1075, 1076, 1084, 1085, 1093, 1094, 1102, 1103, 1111, 1112, 1120, 1121, 1129, 1130, 1138, 1139, 1147, 1148, 1156, 1157, 1165, 1166, 1174, 1175, 1183, 1184, 1192, 1193, 1201, 1202, 1210, 1211, 1219, 1220, 1228, 1229, 1237, 1238, 1246, 1247, 1255, 1256, 1264, 1265, 1273, 1274, 1282, 1283, 1291, 1292, 1300, 1301, 1309, 1310, 1318, 1319, 1327, 1328, 1336, 1337, 1345, 1346, 1354, 1355, 1363, 1364, 1372, 1373, 1381, 1382, 1390, 1391, 1399, 1400, 1408, 1409, 1417, 1418, 1426, 1427, 1435, 1436, 1444, 1445, 1453, 1454, 1462, 1463, 1471, 1472, 1480, 1481, 1489, 1490, 1498, 1499, 1507, 1508, 1516, 1517, 1525, 1526, 1534, 1535, 1543, 1544, 1552, 1553, 1561, 1562, 1570, 1571, 1579, 1580, 1588, 1589, 1597, 1598, 1606, 1607, 1615, 1616, 1624, 1625, 1633, 1634, 1642, 1643, 1651, 1652, 1660, 1661, 1669, 1670, 1678, 1679, 1687, 1688, 1696, 1697, 1705, 1706, 1714, 1715, 1723, 1724, 1732, 1733, 1887, 1890, 1895-1897, 1908, 1910, 1912, 1914, 1916, 1918, 1920, 1922, 1924, 1926, 1928, 1930, or fragments or variants thereof; and
[0761] (iii) at least one coding RNA encoding at least one antigenic protein that is or is derived from VP8* of a Rotavirus A from a P[8] serotype, preferably according to SEQ ID NOs: 591-594, 600-603, 609-612, 618-621, 627-630, 636-639, 645-648, 654-657, 663-666, 672-675, 681-684, 690-693, 699-702, 708-711, 717-720, 726-729, 735-738, 744-747, 753-756, 762-765, 771-774, 780-783, 789-792, 798-801, 807-810, 816-819, 825-828, 834-837, 843-846, 852-855, 861-864, 870-873, 879-882, 888-891, 897-900, 906-909, 915-918, 924-927, 933-936, 942-945, 951-954, 960-963, 969-972, 978-981, 987-990, 996-999, 1005-1008, 1014-1017, 1023-1026, 1032-1035, 1041-1044, 1050-1053, 1059-1062, 1068-1071, 1077-1080, 1086-1089, 1095-1098, 1104-1107, 1113-1116, 1122-1125, 1131-1134, 1140-1143, 1149-1152, 1158-1161, 1167-1170, 1176-1179, 1185-1188, 1194-1197, 1203-1206, 1212-1215, 1221-1224, 1230-1233, 1239-1242, 1248-1251, 1257-1260, 1266-1269, 1275-1278, 1284-1287, 1293-1296, 1302-1305, 1311-1314, 1320-1323, 1329-1332, 1338-1341, 1347-1350, 1356-1359, 1365-1368, 1374-1377, 1383-1386, 1392-1395, 1401-1404, 1410-1413, 1419-1422, 1428-1431, 1437-1440, 1446-1449, 1455-1458, 1464-1467, 1473-1476, 1482-1485, 1491-1494, 1500-1503, 1509-1512, 1518-1521, 1527-1530, 1536-1539, 1545-1548, 1554-1557, 1563-1566, 1572-1575, 1581-1584, 1590-1593, 1599-1602, 1608-1611, 1617-1620, 1626-1629, 1635-1638, 1644-1647, 1653-1656, 1662-1665, 1671-1674, 1680-1683, 1689-1692, 1698-1701, 1707-1710, 1716-1719, 1725-1728, 1734-1737, 1862-1882, 1885, 1888, 1889, 1891-1894, 1898, or fragments or variants thereof,

[0762] wherein preferably the at least one antigenic protein comprises a heterologous element selected from a signal peptide, a linker, a helper epitope, an antigen clustering domain, or a transmembrane domain.

[0763] Item 44:

[0764] Composition of any one of items 41 to 43, wherein the at least one coding RNA or the plurality of coding RNAs is complexed or associated with or at least partially complexed or partially associated with one or more cationic or polycationic compound, preferably cationic or polycationic polymer, cationic or polycationic polysaccharide, cationic or polycationic lipid, cationic or polycationic protein, cationic or polycationic peptide, or any combinations thereof.

[0765] Item 45:

[0766] Composition of item 44, wherein the at least one coding RNA or the plurality of coding RNAs is complexed, encapsulated, partially encapsulated, or associated with one or more lipids, thereby forming liposomes, lipid nanoparticles, lipoplexes, and/or nanoliposomes.

[0767] Item 46:

[0768] Composition of item 45, wherein the at least one coding RNA or the plurality of coding RNAs is complexed with one or more lipids thereby forming lipid nanoparticles (LNP).

[0769] Item 47:

[0770] Composition of item 46, wherein the LNP comprises a cationic lipid according to formula III-3:

[chemical structure]

[0771] Item 48:

[0772] Composition of any one of items 46 to 47, wherein the LNP comprises a PEG lipid, wherein the PEG-lipid is of formula (IVa)

[chemical structure]

[0773] wherein n has a mean value ranging from 30 to 60, preferably wherein n has a mean value of about 45, 46, 47, 48, 49, 50, 51, 52, 53, 54, most preferably wherein n has a mean value of 49.

[0774] Item 49:

[0775] Composition of any one of items 46 to 48, wherein the LNP comprises one or more neutral lipids and/or one or more steroid or steroid analogues.

[0776] Item 50:

[0777] Composition of item 49, wherein the neutral lipid is 1,2-distearoyl-sn-glycero-3-phosphocholine (DSPC), preferably wherein the molar ratio of the cationic lipid to DSPC is in the range from about 2:1 to about 8:1.

[0778] Item 51:

[0779] Composition of item 49, wherein the steroid is cholesterol, preferably wherein the molar ratio of the cationic lipid to cholesterol is in the range from about 2:1 to about 1:1.

[0780] Item 52:

[0781] Composition of any one of items 44 to 49, wherein the LNP comprises or consisting of

[0782] (i) at least one cationic lipid, preferably as defined in item 47;

[0783] (ii) a neutral lipid, preferably as defined in item 50;

[0784] (iii) a steroid or steroid analogue, preferably as defined in item 51; and

[0785] (iv) a PEG-lipid, e.g. PEG-DMG or PEG-cDMA, preferably as defined in item 48.

[0786] Item 53:

[0787] Composition according to any one of items 52, wherein (i) to (iv) are in a molar ratio of about 20-60% cationic lipid, 5-25% neutral lipid, 25-55% sterol, and 0.5-15% PEG-lipid.

[0788] Item 54:

[0789] Composition of item 46, wherein the LNP comprises COATSOME® SS-EC.

[0790] Item 55:

[0791] Composition of any one of items 46 and 54, wherein the LNP comprises a PEG lipid, wherein the PEG-lipid is DMG-PEG 2000.

[0792] Item 56:

[0793] Composition of any one of items 46 and 54 to 55, wherein the LNP further comprises 1,2-diphytanoyl-sn-glycero-3-phosphoethanolamine (DPhyPE) and cholesterol.

[0794] Item 57:

[0795] Composition of items 46 to 56, wherein the LNPs are preferably selected from GN01-LNP or LNP-III-3.

[0796] Item 58:

[0797] A vaccine comprising at least one coding RNA as defined in any one of items 1 to 40, or the composition as defined in any one of items 41 to 58.

[0798] Item 59:

[0799] Vaccine of item 58, wherein the vaccine elicits an adaptive immune response.

[0800] Item 60:

[0801] Vaccine of item 58 to 59, wherein the vaccine elicits an adaptive immune response

[0802] Item 61:

[0803] Vaccine of item 58 to 60, wherein the vaccine induces specific and functional humoral immune responses against Rotavirus; and/or broad, functional cellular T-cell responses against Rotavirus.

[0804] Item 62:

[0805] Vaccine of item 58 to 61, wherein the vaccine induces high levels of virus neutralizing antibodies to prevent a Rotavirus infection, preferably high levels of virus neutralizing antibodies against homologous and heterologous Rotavirus strains.

[0806] Item 63:

[0807] Vaccine of items 58 to 62, wherein the vaccine is a polyvalent vaccine, preferably a trivalent vaccine.

[0808] Item 64:

[0809] A Kit or kit of parts, comprising at least one coding RNA as defined in any one of items 1 to 40, at least one composition as defined in any one of items 41 to 57, and/or at least one vaccine as defined in any one of items 58 to 62, optionally comprising a liquid vehicle for solubilising, and, optionally, technical instructions providing information on administration and dosage of the components.

[0810] Item 65:

[0811] Coding RNA as defined in any one of items 1 to 40, the composition as defined in any one of items 41 to 57, the vaccine as defined in any one of items 58 to 62, or the kit or kit of parts as defined in item 65, for use as a medicament.

[0812] Item 66:

[0813] Coding RNA as defined in any one of items 1 to 40, the composition as defined in any one of items 41 to 57, the vaccine as defined in any one of items 58 to 62, or the kit or kit of parts as defined in item 65, for use in the treatment or prophylaxis of a Rotavirus infection, or of a disorder related to such an infection.

[0814] Item 67:

[0815] Use according to item 66, wherein the Rotavirus infection is a Rotavirus A infection, in particular a Rotavirus A infection of serotypes [P4], [P6], and/or [P8].

[0816] Item 68:

[0817] A method of treating or preventing a disorder, wherein the method comprises applying or administering to a subject in need thereof at least one coding RNA as defined in any one of items 1 to 40, at least one composition as defined in any one of items 41 to 57, at least one vaccine as defined in any one of items 58 to 62, or at least one kit or kit of parts as defined in item 65.

[0818] Item 69:

[0819] Method of item 68, wherein the disorder is an infection with a Rotavirus, or a disorder related to such an infection, preferably a Rotavirus A, or a disorder related to such an infection.

[0820] Item 70:

[0821] Method of items 68 to 69, wherein the subject in need is a mammalian subject, preferably a human subject.

[0822] Item 71:

[0823] Method of any one of items 68 to 70, wherein applying or administering to a subject is performed using intramuscular administration, preferably intramuscular injection.

### BRIEF DESCRIPTION OF TABLES

[0824] Table 1: Preferred VP8* antigen constructs

[0825] Table X1: Suitable heterologous elements for VP8* antigen constructs

[0826] Table 2: Human codon usage table with frequencies indicated for each amino acid

[0827] Table 3: Preferred coding sequences encoding Rotavirus VP8* antigen constructs:

[0828] Table 4: Preferred coding RNA, e.g. mRNA, encoding Rotavirus VP8* antigen constructs

[0829] Table X4: Coding RNA, e.g. mRNA, encoding Rotavirus VP8* antigen constructs and others

[0830] Table 5: RNA constructs encoding different Rotavirus antigen design used in the present examples

[0831] Table 6: RNA constructs used for Western blot analysis (Example 2)

[0832] Table 7: Vaccination scheme of Example 2

[0833] Table 8: Vaccination scheme of Example 3.1

[0834] Table 9 Rotavirus VP8* peptide mix for ICS

[0835] Table 10: Vaccination scheme of Example 3.2

[0836] Table 11: RNA constructs used for Western blot analysis (Example 4)

[0837] Table 12: Vaccination scheme of Example 5

[0838] Table 13: RNA constructs used for Western blot analysis (Example 6)

[0839] Table 14: Vaccination scheme of Example 6.2

[0840] Table 15: Vaccination scheme of Example 8

[0841] Table 16: Vaccination scheme of Example 9

[0842] Table 17: Vaccination scheme of Example 10

[0843] Table 18: Vaccination scheme of Example 11

[0844] Table 19: Vaccination scheme of Example 12

[0845] Table 20: Vaccination scheme of Example 13

### BRIEF DESCRIPTION OF THE DRAWINGS

[0846] FIG. 1 shows schematic drawings of preferred VP8* constructs. P2: T cell helper epitope from tetanus toxin; VP8*: Virus protein 8*, cleavage product of rotavirus VP4 protein (preferably having a length of 65-223, 41-223, 1-223, 20-240, 1-230, 2-230, 10-223 or 11-223, preferably 1-223 or 65-223); SP: Signal peptide; L: Linker; Ferritin: Iron storage protein ferritin; Lum. synt.: Lumazine synthase (LumSynt, LS).

[0847] FIG. 2 shows that mRNA constructs encoding different Rotavirus antigen designs were expressed and partially secreted in mammalian cells using Western blot analysis. The experiment was performed as described in Example 2.1. Further details are provided in Table 6.

[0848] FIG. 3 shows that formulated mRNA constructs encoding different Rotavirus antigen designs induced humoral immune responses in mice. IgG1 and IgG2a antibody titers assessed by ELISA using recombinant Rotavirus protein P2-VP8*P[8] protein as a coating reagent. The experiment was performed as described in Example 2.2. Further construct details are provided in Table 7. Significant IgG1 and IgG2a responses were detectable for all groups vaccinated with the mRNA vaccine encoding different Rotavirus antigen designs.

[0849] FIG. 4 shows the reactivity of Rotavirus serotype P[6] antigen designs.

[0850] FIG. 4-A shows that formulated mRNA constructs encoding different Rotavirus antigen designs induced humoral immune responses in mice. IgG1 and IgG2a antibody titers assessed by ELISA using P2-VP8*P[6] protein as a coating reagent. The experiment was performed as described in Example 3.1.1. Further construct details are provided in Table 8. Significant IgG1 and IgG2a responses were detectable for all groups vaccinated with the mRNA vaccine encoding different Rotavirus antigen designs.

[0851] FIG. 4-B shows cross reactive responses in mice vaccinated with P[6] designs with P[8] serotype protein as a coating reagent. mRNA constructs encoding different Rotavirus antigen designs induced cross reactive humoral immune responses in mice. The experiment was performed as described in Example 3.1.1. Further construct details are provided in Table 8.

[0852] FIG. 4-C shows that formulated mRNA constructs encoding different Rotavirus antigen designs induced cellular immune responses of CD4 and CD8 positive T-cells in mice, using an intracellular cytokine staining assay. The experiment was performed as described in Example 3.1.2. Further construct details are provided in Table 8.

[0853] FIG. 5 shows the reactivity of Rotavirus serotype P[8] antigen designs.

[0854] FIG. 5-A shows that formulated mRNA constructs encoding different Rotavirus antigen designs induced humoral immune responses in mice. IgG1 and IgG2a antibody titers assessed by ELISA using recombinant Rotavirus protein VP8*P[8] as a coating reagent. The experiment was performed as described in Example 3.2.1. Further construct details are provided in Table 10. Significant IgG1 and IgG2a responses were detectable for all groups vaccinated with the mRNA vaccine encoding different Rotavirus antigen designs.

[0855] FIG. 5-B shows cross reactive responses in mice vaccinated with P[8] designs with recombinant Rotavirus protein P2-VP8*P[6] as a coating reagent. mRNA constructs encoding different Rotavirus antigen designs induced cross reactive humoral immune responses in mice. The experiment was performed as described in Example 3.1.2. Further construct details are provided in Table 10.

[0856] FIG. 5-C shows that formulated mRNA constructs encoding different Rotavirus antigen designs induced cellular immune responses of CD4 positive T-cells in mice, using an intracellular cytokine staining assay. In addition Group 8 shows cellular immune responses of CD8 positive T cells. The experiment was performed as described in Example 3.2.2. Further construct details are provided in Table 10.

[0857] FIG. 6 shows that different mRNA designs encoding Rotavirus antigens were expressed in mammalian cells using Western blot analysis. The experiment was performed as described in Example 4. Further details are provided in Table 11.

[0858] FIG. 7 shows significant IgG1 and IgG2a responses for all groups vaccinated with the cap1 mRNA design (Group 4, 5, 6 and 7) encoding the same Rotavirus antigen construct. mRNA designs with a poly(A) sequence, located at 3′ terminus (Group 6 and 7) shown higher IgG responses compared to mRNA designs without a poly(A) sequence, located at 3′ terminus (Group 4 and 5). In addition FIG. 7 shows comparable IgG1 and IgG2a responses for all mRNA designs vaccinated with modified (grey bars) or unmodified (black bars) nucleotides. IgG1 and IgG2a antibody titers assessed by ELISA using Rotavirus protein P2-VP8*P[8] as a coating reagent. The experiment was performed as described in Example 5. Further construct details are provided in Table 12.

[0859] FIG. 8 shows that all mRNA designs with cap1 and a poly(A) sequence, located at 3′ terminus (Group 6 and 7) induced the formation of Rotavirus specific functional antibodies in mice as shown by robust virus neutralizing antibody titers. cap1 mRNA designs without a poly(A) sequence, located at 3′ terminus (Group 4 and 5) shown an effect compared to the negative control (Group 1). The experiment was performed as described in Example 5.2. Further details are provided in Table 12.

[0860] FIG. 9 shows that different mRNA designs encoding Rotavirus antigens were expressed in mammalian cells using Western blot analysis. mRNA designs with co-transcriptional capping and a beneficial UTR combination (Group 1, 2 and 3) showed higher expression compared to the corresponding constructs with enzymatical capping and another UTR combination (Group 4, 5 and 6). The experiment was performed as described in Example 6.1. Further details are provided in Table 13.

[0861] FIG. 10 shows the in vivo analysis of immunogenicity of different mRNA constructs encoding a Rotavirus antigen.

[0862] FIG. 10-A shows early (day 21) IgG1 and IgG2a responses for all groups with a poly(A) sequence, located at 3′ terminus (Group 4, 5, 7, 8, 10, 11 and 13), independent of UTR combination (black bars, striped bars or dotted bars) and modification of nucleotides. The experiment was performed as described in Example 6.2. Further construct details are provided in Table 14.

[0863] FIG. 10-B shows high IgG1 and IgG2a responses after day 56 for all groups vaccinated with different mRNA designs. The experiment was performed as described in Example 6.2. Further construct details are provided in Table 14.

[0864] FIG. 10-C shows early (day 21) IgG1 and IgG2a responses for all groups vaccinated with mRNA designs that are co-transcriptional capped and have a poly(A) sequence, located at 3′ terminus and a UTR combination of HSD17B4/PSMB3 (black bars) compared to mRNA designs with an enzymatical cap, a poly(A) sequence, located at 3 terminus and other UTR combinations (striped bars). The experiment was performed as described in Example 6.2. Further construct details are provided in Table 14.

[0865] FIG. 10-D shows high IgG1 and IgG2a responses after day 56 for all groups vaccinated with different mRNA designs. The experiment was performed as described in Example 6.2. Further construct details are provided in Table 14.

[0866] FIG. 11 shows that all mRNA designs with a poly(A) sequence, located at 3′ terminus (Group 4, 5, 7, 8, 10, 11 and 13) induced the formation of Rotavirus specific functional antibodies in mice as shown by robust virus neutralizing antibody titers. mRNA designs that are co-transcriptional capped and have a poly(A) sequence, located at 3′ terminus and a UTR combination of HSD17B4/PSMB3 (Group 4 and 10) induced higher VNT titers compared to mRNA designs with enzymatical cap (Group 7 and 3). This effect is independent of modified nucleotides. The experiment was performed as described in Example 6.3. Further details are provided in Table 14.

[0867] FIG. 12 shows INFalpha levels in the sera 14 hours after prime immunization. Group 2, the recombinant Rotavirus protein P2-VP8*P[8]+Alum, and Groups with modified nucleotides (Group 9, 10, 11, 12 and 13) induced no increasing of INFalpha levels. Group 6, 7 and 8 induced high INFalpha levels compared to group Group 3, 4 and 5. Group 3, 4 and 5 showed only a moderate increasing of INFalpha levels in the sera. The experiment was performed as described in Example 6.2 and 6.4. Further details are provided in Table 14.

[0868] FIG. 13 shows cellular immune responses of CD8 and CD4 positive T-cells in mice, using an intracellular cytokine staining assay. Group 4, 5, 10 and 11 induced the highest cellular immune responses of CD8 positive T-cells. All groups of Rotavirus vaccines with a poly(A) sequence, located at 3′ terminus showed higher cellular immune responses of CD4 positive T-cells compared to the recombinant Rotavirus protein P2-VP8*P[8]+Alum (Group 2). The experiment was performed as described in Example 6.5. Further construct details are provided in Table 14.

[0869] FIG. 14 shows that formulated Rotavirus VP8* mRNA vaccines encoding different antigen designs induce humoral immune responses in guinea pigs, using an ELISA and VNT assay. FIG. 14A: coating: P2-VP8*P[8]; IgG endpoint titers at day 21 post prime vaccination; FIG. 14B: coating: P2-VP8*P[8]; IgG endpoint titers at day 42 post prime vaccination; FIG. 14C: coating: P2-VP8*P[8]; IgG endpoint titers at day 56 post prime vaccination; FIG. 14D: VNTs against Rotavirus virus strain Wa (G1P[8]) at day 56 post prime vaccination. Groups 3 to 5 received 6 μg Rotavirus VP8* mRNA vaccine, Groups 6 to 10 received 25 μg Rotavirus VP8* mRNA vaccine, Groups 11 to 13 received 100 μg Rotavirus VP8* mRNA vaccine, Group 1 is the negative control sham-immunized with NaCl and Group 2 is the positive control immunized with 20 μg recombinant Rotavirus VP8* P[8] protein. For vaccination scheme, see Table 15. Further details provided in Example 8.

[0870] FIG. 15 shows that formulated Rotavirus VP8* mRNA vaccines encoding different antigen designs induce longevity humoral immune responses in guinea pigs, using an ELISA assay. Coating: P2-VP8*P[8]; IgG endpoint titers at day 21, 42, 56, 84, 112 and 140 post prime vaccination; for longevity ELISA only Groups 1, 2, 6, 8 and 10 were selected. Groups 6 to 10 received 25 μg Rotavirus VP8* mRNA vaccine, Group 1 is the negative control sham-immunized with NaCl and Group 2 is the positive control immunized with 20 μg recombinant Rotavirus VP8* P[8] protein. For vaccination scheme, see Table 15. Further details provided in Example 8.

[0871] FIG. 16 shows that formulated Rotavirus VP8* mRNA vaccines encoding different antigen designs induce humoral immune responses in guinea pigs, using an ELISA assay. FIG. 16A: coating: P2-VP8*P[8]; IgG endpoint titers at day 21 post prime vaccination; FIG. 16B: coating: P2-VP8*P[8]; IgG endpoint titers at day 42 post prime vaccination; FIG. 16C: coating: P2-VP8*P[8]; IgG endpoint titers at day 56 post prime vaccination; FIG. 16D: coating: P2-VP8*P[8]; IgA endpoint titers at day 56 post prime vaccination; Groups 3 to 6 received 6 μg Rotavirus VP8* mRNA vaccine, Groups 7 to 10 received 25 μg Rotavirus VP8* mRNA vaccine, Group 1 is the negative control sham-immunized with NaCl and Group 2 is the positive control immunized with 20 μg recombinant Rotavirus VP8* P[8] protein. For vaccination scheme, see Table 16. Further details provided in Example 9.

[0872] FIG. 17 shows that formulated Rotavirus VP8* mRNA vaccines encoding different antigen designs induce longevity humoral immune responses in guinea pigs, using an ELISA assay. Coating: P2-VP8*P[8]; IgG endpoint titers at day 21, 42, 56, 84, 112, 140, 168 and 196 post prime vaccination; for longevity ELISA only Groups 1, 2, 7, 8, 9 and 10 were selected. Groups 7 to 10 received 25 μg Rotavirus VP8* mRNA vaccine, Group 1 is the negative control sham-immunized with NaCl and Group 2 is the positive control immunized with 20 μg recombinant Rotavirus VP8* P[8] protein. For vaccination scheme, see Table 16. Further details provided in Example 9.

[0873] FIG. 18 shows that formulated Rotavirus VP8* mRNA vaccines encoding different antigen designs induce humoral immune responses in guinea pigs, using a VNT assay. FIG. 18A: serum incubation with Wa (G1P[8]) at day 56 post prime vaccination; FIG. 18B: serum incubation with rotavirus 1076 (G2P[6]) at day 56 post prime vaccination; FIG. 18C: serum incubation with rotavirus DS-1 (G2P[4]) at day 56 post prime vaccination; Groups 3 to 6 received 6 μg Rotavirus VP8* mRNA vaccine, Groups 7 to 10 received 25 μg Rotavirus VP8* mRNA vaccine, Group 1 is the negative control sham-immunized with NaCl and Group 2 is the positive control immunized with 20 μg recombinant Rotavirus VP8* P[8] protein. For vaccination scheme, see Table 16. Further details provided in Example 9.

### EXAMPLES

[0874] In the following, particular examples illustrating various embodiments and aspects of the invention are presented. However, the present invention shall not to be limited in scope by the specific embodiments described herein. The following preparations and examples are given to enable those skilled in the art to more clearly understand and to practice the present invention. The present invention, however, is not limited in scope by the exemplified embodiments, which are intended as illustrations of single aspects of the invention only, and methods which are functionally equivalent are within the scope of the invention. Indeed, various modifications of the invention in addition to those described herein will become readily apparent to those skilled in the art from the foregoing description, accompanying figures and the examples below. All such modifications fall within the scope of the appended claims.

### Example 1: Preparation of DNA and RNA Constructs, Compositions, and Vaccines

[0875] The present Example provides methods of obtaining the RNA of the invention as well as methods of generating a composition or a vaccine of the invention.

[0876] 1.1. Preparation of DNA and RNA Constructs:

[0877] DNA sequences encoding different Rotavirus antigenic proteins were prepared and used for subsequent RNA in vitro transcription. Said DNA sequences were prepared by modifying the wild type CDS sequences by introducing an optimized CDS. Sequences were introduced into a plasmid vector to comprise optionally (i) advantageous 3′-UTR sequences derived from PSMB3, ALB7 or alpha-globin (“muag”) and (ii) advantageous 5′-UTR sequences selected from HSD17B4 or RPL32, additionally comprising (iii) a stretch of adenosines, and optionally a histone-stem-loop structure, and optionally a stretch of 30 cytosines (Table 5).

[0878] Obtained plasmid DNA was transformed and propagated in bacteria using common protocols and plasmid DNA was extracted, purified, and used for subsequent RNA in vitro transcription (see section 1.2.). Alternatively, DNA plasmids were used as DNA template for PCR-based amplification. The generated PCR products were purified and used for subsequent RNA in vitro transcription (see section 1.3.).

[0879] 1.2. RNA In Vitro Transcription from Plasmid DNA Templates:

[0880] DNA plasmids prepared according to section 1.1 were enzymatically linearized using a restriction enzyme and used for DNA dependent RNA in vitro transcription using T7 RNA polymerase in the presence of a nucleotide mixture (ATP/GTP/CTP/UTP) and cap analogue (e.g., m7GpppG or m7G(5′)ppp(5′)(2′OMeA)pG or m7G(5′)ppp(5′)(2′OMeG)pG)) under suitable buffer conditions. m7G(5′)ppp(5′)(2′OMeA)pG cap analog was used for preparation of some RNA constructs to generate co-transcriptionally a cap1 structure. The obtained RNA constructs were purified using RP-HPLC (PureMessenger®, CureVac AG, Tubingen, Germany; WO2008/077592) and used for in vitro and in vivo experiments. DNA templates may also be generated using PCR. Such PCR templates were used for DNA dependent RNA in vitro transcription using an RNA polymerase as outlined herein.

[0881] To obtain modified mRNA RNA in vitro transcription was performed in the presence of a modified nucleotide mixture (ATP, GTP, CTP, pseudouridine (Ψ) and cap analogue (m7GpppG or m7G(5′)ppp(5′)(2′OMeA)pG) under suitable buffer conditions. The obtained Ψ-modified mRNAs were purified using RP-HPLC (PureMessenger®, CureVac AG, Tübingen, Germany; WO2008/077592) and used for further experiments. Some RNA constructs were in vitro transcribed in the absence of a cap analog. The cap-structure (cap0 or cap1) was then added enzymatically using capping enzymes as commonly known in the art. In short, in vitro transcribed RNA was capped using a capping kit to obtain cap0-RNA. cap0-RNA was additionally modified using cap specific 2′-O-methyltransferase to obtain cap1-RNA. cap1-RNA was purified e.g. as explained above and used for further experiments.

[0882] RNA for clinical development is produced under current good manufacturing practice e.g. according to WO2016/180430, implementing various quality control steps on DNA and RNA level.

[0883] The generated RNA sequences/constructs are provided in Table 5 with the encoded antigenic protein and the respective UTR elements indicated therein.

[0884] 1.3. RNA In Vitro Transcription from PCR Amplified DNA Templates:

[0885] Purified PCR amplified DNA templates prepared according to paragraph 1.1 are transcribed in vitro using DNA dependent T7 RNA polymerase in the presence of a nucleotide mixture (ATP/GTP/CTP/UTP) and cap analogue (m7GpppG or 3′-O-Me-m7G(5′)ppp(5′)G)) under suitable buffer conditions. Alternatively, PCR amplified DNA is transcribed in vitro using DNA dependent T7 RNA polymerase in the presence of a modified nucleotide mixture (ATP, GTP, CTP, N1-methylpseudouridine (m1Ψ) or pseudouridine (Ψ) and cap analogue (m7GpppG, m7G(5′)ppp(5′)(2′OMeA)pG or m7G(5′)ppp(5′)(2′OMeG)pG) under suitable buffer conditions. Some RNA constructs are in vitro transcribed in the absence of a cap analogue and the cap-structure (cap0 or cap1) is added enzymatically using capping enzymes as commonly known in the art. The obtained RNA is purified e.g. as explained above and used for further experiments.

TABLE 5
RNA constructs encoding different Rotavirus antigen design used in the present examples

| | | | mRNA Design | | | | | |
|---|---|---|---|---|---|---|---|---|
| | | | | | Poly(A) | | | |
| | | | | UTR | sequence, | | | |
| | | | 5′-cap | design | located at 3′ | | | |
| RNA | Construct | Rotavirus | structure | 5′-UTR/ | terminus | Modified | SEQ ID | SEQ ID |
| ID | design | Serotype | (Description) | 3′-UTR | (Description) | nucleotides | NO: RNA | NO: PRT |
| R5470 | P2-Linker- | P[8] | cap0 | RPL32/ | — | — | 1865 | 4, 51 |
| | VP8*(65-223) | | | ALB7 | | | | |
| R6326 | P2-Linker- | P[8] | cap0 | RPL32/ | — | — | 1874 | 69 |
| | VP8*(65- | | | ALB7 | | | | |
| | 223)-Linker- | | | | | | | |
| | Ferritin | | | | | | | |
| R5488 | SP(IgE)-P2- | P[8] | cap0 | RPL32/ | — | — | 1880 | 114 |
| | Linker- | | | ALB7 | | | | |
| | VP8*(41-223) | | | | | | | |
| R6322 | SP(IgE)-P2- | P[8] | cap0 | RPL32/ | — | — | 1881 | — |
| | Linker- | | | ALB7 | | | | |
| | VP8*(41- | | | | | | | |
| | 223)-Linker- | | | | | | | |
| | Ferritin | | | | | | | |
| R6324 | SP(IgE)-P2- | P[8] | cap0 | RPL32/ | — | — | 1882 | — |
| | Linker- | | | ALB7 | | | | |
| | VP8*(41- | | | | | | | |
| | 223)-Linker- | | | | | | | |
| | TM(HA) | | | | | | | |
| R6328 | LumSynt.- | P[8] | cap0 | RPL32/ | — | — | 1877 | 1, 96 |
| | Linker-P2- | | | ALB7 | | | | |
| | Linker- | | | | | | | |
| | VP8*(41-223) | | | | | | | |
| R5433 | SP(HsPLAT)- | P[6] | cap0 | RPL32/ | — | — | 1895 | — |
| | VP8*(41-223) | | | ALB7 | | | | |
| R5434 | SP(HsPLAT)- | P[6] | cap0 | RPL32/ | — | — | 1896 | — |
| | P2-Linker- | | | ALB7 | | | | |
| | VP8*(41-223) | | | | | | | |
| R5435 | SP(HsPLAT)- | P[6] | cap0 | RPL32/ | — | — | 1897 | — |
| | VP8*(2-230) | | | ALB7 | | | | |
| R5436 | SP(HsPLAT)- | P[6] | cap0 | RPL32/ | — | — | 1890 | — |
| | VP8*(21-240) | | | ALB7 | | | | |
| | (N => Q | | | | | | | |
| | mutation) | | | | | | | |
| R5480 | SP(HSA)- | P[8] | cap0 | RPL32/ | — | — | 1891 | — |
| | VP8*(2-230) | | | ALB7 | | | | |
| R5482 | SP(HSA)- | P[8] | cap0 | RPL32/ | — | — | 1892 | — |
| | VP8*(11-223) | | | ALB7 | | | | |
| R5484 | SP(HSA)- | P[8] | cap0 | RPL32/ | — | — | 1893 | — |
| | VP8*(41-223) | | | ALB7 | | | | |
| R5486 | SP(HSA)-P2- | P[8] | cap0 | RPL32/ | — | — | 1894 | — |
| | Linker- | | | ALB7 | | | | |
| | VP8*(41-223) | | | | | | | |
| R8044 | P2-Linker- | P[8] | cap1 (co- | HSD17B4/ | — | — | 1864 | 4, 51 |
| | VP8*(65-223) | | trans. cap) | PSMB3 | | | | |
| R8046 | P2-Linker- | P[8] | cap1 (enzym. | RPL32/ | + (enzym. | — | 1865 | 4, 51 |
| | VP8*(65-223) | | cap) | ALB7 | poly(A)) | | | |
| R8047 | P2-Linker- | P[8] | cap0 | RPL32/ | — | m1Ψ | 1870 | 4, 51 |
| | VP8*(65-223) | | | ALB7 | | | | |
| R8049 | P2-Linker- | P[8] | cap1 (co- | HSD17B4/ | — | m1Ψ | 1868 | 4, 51 |
| | VP8*(65-223) | | trans. cap) | PSMB3 | | | | |
| R7411 | P2-Linker- | P[8] | cap1 (enzym. | —/muag | + (enzym. | m1Ψ | 1869 | 4, 51 |
| | VP8*(65-223) | | cap) | | poly(A)) | | | |
| R8134 | P2-Linker- | P[8] | cap1 (co- | HSD17B4/ | + (enzym. | — | 1864 | 4, 51 |
| | VP8*(65-223) | | trans. cap) | PSMB3 | poly(A)) | | | |
| R8131 | P2-Linker- | P{8] | cap1 (co- | HSD17B4/ | + (A100) | — | 1862, | 4, 51 |
| | VP8*(65-223) | | trans. cap) | PSMB3 | | | 591 | |
| R8135 | P2-Linker- | P[8] | cap1 (enzym. | RPL32/ | — | — | 1865 | 4, 51 |
| | VP8*(65-223) | | cap) | ALB7 | | | | |
| R8138 | P2-Linker- | P[8] | cap1 (enzym. | RPL32/ | + (A100) | — | 1898 | 4, 51 |
| | VP8*(65-223) | | cap) | ALB7 | | | | |
| R8136 | P2-Linker- | P[8] | cap1 (co- | HSD17B4/ | + (enzym. | m1Ψ | 1868 | 4, 51 |
| | VP8*(65-223) | | trans. cap) | PSMB3 | poly(A)) | | | |
| R8133 | P2-Linker- | P[8] | cap1 (co- | HSD17B4/ | + (A100) | m1Ψ | 1866 | 4, 51 |
| | VP8*(65-223) | | trans. cap) | PSMB3 | | | | |
| R8137 | P2-Linker- | P[8] | cap1 (enzym. | —/muag | — | m1Ψ | 1869 | 4, 51 |
| | VP8*(65-223) | | cap) | | | | | |
| R8628 | P2-Linker- | P[8] | cap1 (co- | HSD17B4/ | + (A100) | — | 1863, | 4. 51 |
| | VP8*(65-223) | | trans. cap) | PSMB3 | | | 1167 | |
| R8575 | P2-Linker- | P[8] | cap1 (co- | HSD17B4/ | + (A100) | m1Ψ | 1863, | 4, 51 |
| | VP8*(65-223) | | trans. cap) | PSMB3 | | | 1167 | |
| R8576 | P2-Linker- | P[8] | cap1 (co- | HSD17B4/ | + (A100) | Ψ | 1863, | 4, 51 |
| | VP8*(65-223) | | trans. cap) | PSMB3 | | | 1167 | |
| R8629 | P2-Linker- | P[8] | cap1 (co- | HSD17B4/ | + (A100) | Ψ | 1867 | 4, 51 |
| | VP8*(65-223) | | trans. cap) | PSMB3 | | | | |
| R8577 | P2-Linker- | P[8] | cap1 (co- | HSD17B4/ | + (A100) | — | 1873, | 69 |
| | VP8*(65- | | trans. cap) | PSMB3 | | | 1185 | |
| | 223)-Linker- | | | | | | | |
| | Ferritin | | | | | | | |
| R8578 | LumSynt.- | P[8] | cap1 (co- | HSD17B4/ | + (A100) | — | 1876, | 1, 96 |
| | Linker-P2- | | trans. cap) | PSMB3 | | | 1212 | |
| | Linker- | | | | | | | |
| | VP8*(41-223) | | | | | | | |
| R8579 | SP(IgE)-P2- | P[8] | cap1 (co- | HSD17B4/ | + (A100) | — | 1879, | 114 |
| | Linker- | | trans. cap) | PSMB3 | | | 1230 | |
| | VP8*(41-223) | | | | | | | |
| R9247 | P2-Linker- | P[4] | cap1 (co- | HSD17B4/ | + (A100) | — | 1919 | 1899 |
| | VP8*(64-223) | | trans. cap) | PSMB3 | | | | |
| R9246 | P2-Linker- | P[6] | cap1 (co- | HSD17B4/ | + (A100) | — | 1920 | 1900 |
| | VP8*(64-223) | | trans. cap) | PSMB3 | | | | |
| R9078 | P2-Linker- | P[4] | cap1 (co- | HSD17B4/ | + (A100) | — | 1921 | 6, 46 |
| | VP8*(65-223) | | trans. cap) | PSMB3 | | | | |
| R9077 | P2-Linker- | P[6] | cap1 (co- | HSD17B4/ | + (A100) | — | 1922 | 5, 49 |
| | VP8*(65-223) | | trans. cap) | PSMB3 | | | | |
| R9092 | LumSynt.- | P[4] | cap1 (co- | HSD17B4/ | + (A100) | — | 1923 | 3, 91 |
| | Linker-P2- | | trans. cap) | PSMB3 | | | | |
| | Linker- | | | | | | | |
| | VP8*(41-223) | | | | | | | |
| R9091 | LumSynt.- | P[6] | cap1 (co- | HSD17B4/ | + (A100) | — | 1924 | 2, 94 |
| | Linker-P2- | | trans. cap) | PSMB3 | | | | |
| | Linker- | | | | | | | |
| | VP8*(41-223) | | | | | | | |

[0886] Brief Description of the Table 5:

[0887] P2: T cell helper epitope from tetanus toxin; VP8*: Virus protein 8*, cleavage product of rotavirus VP4 protein (preferably having a length of 65-223, 41-223, 1-223, 20-240, 1-230, 2-230, 10-223 or 11-223); SP: signal peptide (preferably derived from secretory signal peptides, preferably human serum albumin (HSA), tissue plasminogen activator (HsPLAT) or immunoglobulin IgE (IgE)); Ferritin: iron storage protein ferritin, heterologous antigen-clustering element; LumSynt: Lumazine synthase, heterologous antigen-clustering element; TM: Transmembrane domain (preferably derived from an influenza HA); P[X]: Rotavirus P serotypes; m1Ψ: modified nucleotide (N1-methylpseudouridine); Ψ: modified nucleotide (pseudouridine); poly(A) sequence, located at 3′ terminus: poly(A) sequence obtained by enzymatic polyadenylation (enzym. poly(A)) or a DNA template (A100); cap0: methylation of the first nucleobase, e.g. m7GpppN; cap1: additional methylation of the ribose of the adjacent nucleotide of m7GpppN; co trans. cap: co-transcriptional capping (preferably CleanCap); enzym. cap: enzymatically capping (preferably ScriptCap); N=>Q mutation: mutation in position N32Q, N56Q, N97Q, N111Q, N114Q, N132Q, N171Q and/or N182Q.

[0888] 1.4. Preparation of Vaccine:

[0889] 1.4.1 LNP Formulation

[0890] Lipid nanoparticles (LNP), cationic lipids, and polymer conjugated lipids (PEG-lipid) were prepared and tested essentially according to the general procedures described in WO2015/199952, WO2017/004143 and WO2017/075531, the full disclosures of which are incorporated herein by reference. LNP formulated RNA was prepared using an ionizable amino lipid (cationic lipid), phospholipid, cholesterol and a PEGylated lipid. Briefly, cationic lipid compound of formula III-3, DSPC, cholesterol, and PEG-lipid of formula IVa were solubilized in ethanol at a molar ratio (%) of approximately 50:10:38.5:1.5 or 47.4:10:40.9:1.7. LNPs comprising cationic lipid compound of formula III-3 and PEG-lipid compound of formula IVa were prepared at a ratio of RNA to total Lipid of 0.03-0.04 w/w. The RNA was diluted to 0.05 mg/mL to 0.2 mg/mL in 10 mM to 50 mM citrate buffer, pH4. Syringe pumps were used to mix the ethanolic lipid solution with the RNA aqueous solution at a ratio of about 1:5 to 1:3 (vol/vol) with total flow rates above 15 ml/min. The ethanol was then removed and the external buffer replaced with a PBS buffer comprising Sucrose by dialysis. Finally, the lipid nanoparticles were filtered through a 0.2 um pore sterile filter and the LNP-formulated RNA composition was adjusted to about 1 mg/ml total RNA. Lipid nanoparticle particle diameter size was 60-90 nm as determined by quasi-elastic light scattering using a Malvern Zetasizer Nano (Malvern, UK). For other cationic lipid compounds mentioned in the present specification, the formulation process is essentially similar.

[0891] In general, LNPs were prepared using cationic lipids, structural lipids, a PEG-lipids, and cholesterol. Lipid solution (in ethanol) was mixed with RNA solution (aqueous buffer) using a microfluidic mixing device or using T-piece formulation. Obtained LNPs were re-buffered in a carbohydrate buffer via dialysis, and up-concentrated to a target concentration using ultracentrifugation tubes. LNP-formulated mRNA can be stored at −80° C. prior to use in in vitro or in vivo experiments.

[0892] The obtained LNP-formulated RNA composition (1 mg/ml total RNA) was diluted to the desired target concentration using Saline before in vivo application.

[0893] 1.4.2 Protamine Complexation:

[0894] The mRNA vaccine consisted of a mixture of 50% free mRNA and 50% mRNA complexed with protamine at a weight ratio of 2:1. First, mRNA was complexed with protamine by addition of protamine-Ringer's lactate solution to mRNA. After incubation for 10 minutes, when the complexes were stably generated, free mRNA was added, and the final concentration of the vaccine was adjusted with Ringer's lactate solution.

### Example 2: Analysis of Rotavirus Antigen Designs

[0895] 2.1 In Vitro Analysis of Expression and Secretion of Rotavirus Antigen Designs

[0896] The present example shows that RNA constructs encoding different Rotavirus antigen designs were expressed and secreted in mammalian cells.

[0897] To determine in vitro protein expression of some of the RNA constructs, HEK 293T cells were transfected with unformulated mRNA encoding different Rotavirus antigen designs using Lipofectamine 2000. 24 h-48 h after transfection, cell lysates and cell culture supernatants were subjected to SDS-PAGE and Western blot analysis using rabbit anti-VP8* P[4 and 8] antibody (1:1000; Aldevron) or mouse anti-alpha-tubulin antibody (1:1000; Abcam) as primary antibodies as well as goat anti-rabbit IgG IRDye®800CW or 680RD antibody (1:10000; Li-Cor) or goat anti-mouse IgG IRDye® 680RD or 800CW antibody (1:10000; Li-Cor) as secondary antibodies. Detection and quantification was performed using a Li-Cor detection system (Odyssey CLx image system) in combination with Image Studio Lite software. Table 6 contains mRNA constructs that were used in the experiment:

TABLE 6
RNA constructs used for Western blot analysis (Example 2)

| | RNA | | Size | SEQ ID |
|---|---|---|---|---|
| Group | ID | Construct design | kDa | NO: RNA |
| 1 | R5470 | P2-Linker-VP8*(65-223) | 19 | 1865 |
| 2 | R6326 | P2-Linker-VP8*(65-223)-Linker-Ferritin | 38 | 1874 |
| 3 | R5488 | SP(IgE)-P2-Linker-VP8*(41-223) | 24 | 1880 |
| 4 | R6322 | SP(IgE)-P2-Linker-VP8*(41-223)-Linker-Ferritin | 41 | 1881 |
| 5 | R6324 | SP(IgE)-P2-Linker-VP8*(41-223)-Linker-TM | 30 | 1882 |
| 6 | R6328 | LumSynt-Linker-P2-Linker-VP8*(41-223) | 43 | 1877 |
| 7 | — | Negative control (WFI = water for infusion) | — | 1883 |

[0898] Results:

[0899] Expression of all six RNA constructs was demonstrated in the corresponding cell lysates (see FIG. 2). The tested Rotavirus antigen design of Group 6 (corresponding Table 6) was detectable in the supernatant of transfected 293T cells (see FIG. 2). Indistinct (e.g. Group 3, corresponding Table 6, see FIG. 2) gel bands or shifts in their positions likely due to the glycosylation of the protein.

[0900] 2.2: In Vivo Analysis of Immunogenicity of Rotavirus Antigen Designs

[0901] The present example shows that Rotavirus mRNA vaccines encoding different antigen designs induce humoral immune responses in mice (Balb/c).

[0902] mRNA constructs encoding different Rotavirus antigen designs (see Table 7) were prepared according to Example 1. The mRNA was formulated with protamine (see Example 1.4.2 Protamine complexation). The different mRNA vaccine candidates were applied on day 0, 21, and 42 and administered intradermal (i.d.) with 80 ug of RNA as shown in Table 7. One negative control group (1) received an irrelevant mRNA. Blood samples were taken at day 21, 42, and 56 for determination of humoral immune responses.

[0903] ELISA was performed using recombinant Rotavirus protein P2-VP8*P[8] for coating. Coated plates were incubated using respective serum dilutions, and binding of specific antibodies to the respective recombinant Rotavirus protein P2-VP8*P[8] was detected using biotinylated isotype specific anti-mouse antibodies followed by streptavidin-HRP (horse radish peroxidase) with Amplex as substrate. Endpoint titers of antibodies (IgG1, IgG2a) directed against the recombinant Rotavirus protein P2-VP8*P[8] were measured by ELISA on day 21, 42, and 56 post vaccinations.

TABLE 7
Vaccination scheme of Example 2

| | No. of | | | RNA | | SEQ ID |
|---|---|---|---|---|---|---|
| Group | mice | Dose | Volume | ID | Construct design | NO: RNA |
| 1 | 7 | 80 μg | 2 × 50 μl | — | Irrelevant RNA | 1883 |
| 2 | 7 | 80 μg | 2 × 50 μl | R5470 | P2-Linker-VP8*(65-223) | 1865 |
| 3 | 7 | 80 μg | 2 × 50 μl | R6326 | P2-Linker-VP8*(65-223)-Linker-Ferritin | 1874 |
| 4 | 7 | 80 μg | 2 × 50 μl | R5488 | SP(IgE)-P2-Linker-VP8*(41-223) | 1880 |
| 5 | 7 | 80 μg | 2 × 50 μl | R6324 | SP(IgE)-P2-Linker-VP8*(41-223)-Linker-TM | 1882 |
| 6 | 7 | 80 μg | 2 × 50 μl | R6328 | LumSynt-Linker-P2-Linker-VP8*(41-223) | 1877 |

### Example 3: (Cross) Reactivity of Rotavirus Antigen Designs

[0904] 3.1 Cross Reactivity of Rotavirus Serotype P[6] Antigen Designs

[0905] 3.1.1 Determination of Specific and Cross Reactive Humoral Immune Responses by ELISA

[0906] Balb/c mice were immunized with RNA vaccines (as prepared in Example 1) encoding different VP8* antigen designs from serotype P[6], recombinant Rotavirus protein P2-VP8*P[8] as a positive control or RiLa (Ringer lactate) as a negative control as indicated in Table X4 below. The mRNA was formulated with protamine (see Example 1.4.2 Protamine complexation). Vaccinations were performed on day 0, 21 and 42. Blood samples taken on day 21, 42, 57 and 71 were analyzed for the presence of VP8* specific IgG1 and IgG2a antibodies by ELISA using recombinant Rotavirus protein P2-VP8*P[6] (FIG. 4-A), or recombinant Rotavirus protein P2-VP8*P[8] (FIG. 4-B) as a coating reagent.

[0907] 3.1.2 Intracellular Cytokine Staining (ICS):

[0908] Splenocytes from vaccinated mice were isolated on day 71 according to a standard protocol known in the art. Briefly, isolated spleens were grinded through a cell strainer and washed in PBS/1% FBS followed by red blood cell lysis. After an extensive washing step with PBS/1% FBS, splenocytes were seeded into 96-well plates (2×10⁶ cells per well). Cells were stimulated with a mixture of Rotavirus VP8* peptides (see Table 9) (5 ug/ml each) in the presence of 2.5 ug/ml each of an anti-CD28 antibody (BD Biosciences) and a protein transport inhibitor for 6 h at 37° C. After stimulation, cells were washed and stained for intracellular cytokines using the Cytofix/Cytoperm reagent (BD Biosciences) according to the manufacturer's instructions. The following antibodies were used for staining: Thy1.2-FITC (1:200), CD8-APC-H7 (1:100), TNF-PE (1:100), IFNγ-APC (1:100) (eBioscience), CD4-BD Horizon V450 (1:200) (BD Biosciences) and incubated with Fcγ-block diluted 1:100. Aqua Dye was used to distinguish live/dead cells (Invitrogen). Cells were acquired using a BD FACS Canto II flow cytometer (Beckton Dickinson). Flow cytometry data was analyzed using FlowJo software (Tree Star, Inc.). Results are shown in FIG. 4-C.

TABLE 8
Vaccination scheme of Example 3.1

| | No. of | | | RNA | | SEQ ID |
|---|---|---|---|---|---|---|
| Group | mice | Dose | Volume | ID | Construct design | NO: RNA |
| 1 | 6 | — | 2 × 50 μl | — | RiLa - negative control | — |
| 2 | 6 | 6 μg | 4 × 25 μl | — | Recombinant Rotavirus protein | — |
| | | | | | VP8*P[8] + Alum | |
| 3 | 12 | 80 μg | 2 × 50 μl | R5433 | SP(HsPLAT)-VP8*[P6](41-223) | 1895 |
| 4 | 12 | 80 μg | 2 × 50 μl | R5434 | SP(HsPLAT)-P2-VP8*[P6](41-223) | 1896 |
| 5 | 12 | 80 μg | 2 × 50 μl | R5435 | SP(HsPLAT)-VP8*[P6](1-223) | 1897 |
| 6 | 12 | 80 μg | 2 × 50 μl | R5436 | SP(HsPLAT)-VP8*[P6](20-240) (N→Q mutation) | 1890 |

TABLE 9
Rotavirus VP8* peptide mix for ICS

| MHC class | Serotype | Peptide sequence |
|---|---|---|
| MHCI | P[4]/P[6]/P[8] | FYIIPRSQE |
| MHCI | P[4]/P[8] | KYGGRVWTF |
| MHCI | P[4]/[P8] | VYESTNNSD |
| MHCI | P[6] | FYNSVWTFH |
| MHCI | P[6] | GFMKFYNSV |
| MHCII | P[4]/P[8] | SDFWTAVIAVEPHVN |
| MHCII | P[6] | TNKTDIWVALLLVEP |
| MHCII | P[6] | HKRTLTSDTKLAGFM |

[0909] Results:

[0910] As shown in FIG. 4-A, statistically significant IgG1 and IgG2a responses compared to the negative control were detectable for all groups vaccinated with the mRNA vaccine of different VP8*P[6] antigen designs when recombinant Rotavirus protein P2-VP8*P[6] was used as a coating reagent.

[0911] FIG. 4-B shows cross-reactive responses in mice vaccinated with VP8*P[6] designs with the recombinant Rotavirus protein P2-VP8*P[8] used as a coating reagent.

[0912] CD4 positive T cells play an important role in the immune system, particularly in the adaptive immune system. They help the activity of other immune cells by releasing T cell cytokines and are essential in B cell antibody class switching, in the activation and growth of cytotoxic T cells. An effective Rotavirus vaccine should induce CD4+ T cell responses. CD8+ T cells are a major protective immune mechanism against intracellular infections, like Rotavirus virus infections. An effective Rotavirus vaccine should also induce CD8+ T cells responses.

[0913] As shown in FIG. 4-C, statistically significant CD4 positive T cell responses were detectable for all groups vaccinated with the mRNA vaccine. Additionally, Group 6 (see Table 8) shows CD8 positive T cell responses.

[0914] Additional improvements to the mRNA design or formulation could lead to an enhanced immune response after vaccination (see Example 5).

[0915] Accordingly, these findings highlight one of the advantageous features of the inventive mRNA-based Rotavirus vaccine designs.

[0916] 3.2: Cross Reactivity of Rotavirus Serotype P[8] Antigen Designs

[0917] 3.2.1 Determination of Specific and Cross Reactive Humoral Immune Responses by ELISA

[0918] Balb/c mice were immunized with RNA vaccines (as prepared in Example 1) encoding different VP8* antigen designs from serotype P[8], recombinant protein VP8*P[8] as a positive control or RiLa (Ringer lactate) as a negative control as indicated in Table 10 below. The mRNA was formulated with protamine (see Example 1.4.2 Protamine complexation). Vaccinations were performed on day 0, 21 and 42. Blood samples taken on day 21, 42, 56 and 71 were analyzed for the presence of VP8* specific IgG1 and IgG2a antibodies by ELISA using VP8*P[8] protein (FIG. 5-A), or VP8* P[6] protein (FIG. 5-B) as a coating reagent.

[0919] 3.2.2: Intracellular Cytokine Staining

[0920] Splenocytes from vaccinated mice were isolated on day 71 according to a standard protocol known in the art. Briefly, isolated spleens were grinded through a cell strainer and washed in PBS/1% FBS followed by red blood cell lysis. After an extensive washing step with PBS/1% FBS, splenocytes were seeded into 96-well plates (2×10⁶ cells per well). Cells were stimulated with a mixture of Rotavirus VP8* peptides (see Table 9) (5 ug/ml each) in the presence of 2.5 ug/ml each of an anti-CD28 antibody (BD Biosciences) and a protein transport inhibitor for 6 h at 37° C. After stimulation, cells were washed and stained for intracellular cytokines using the Cytofix/Cytoperm reagent (BD Biosciences) according to the manufacturer's instructions. The following antibodies were used for staining: Thy1.2-FITC (1:200), CD8-APC-H7 (1:100), TNF-PE (1:100), IFNγ-APC (1:100) (eBioscience), CD4-BD Horizon V450 (1:200) (BD Biosciences) and incubated with Fcγ-block diluted 1:100. Aqua Dye was used to distinguish live/dead cells (Invitrogen). Cells were acquired using a BD FACS Canto II flow cytometer (Beckton Dickinson). Flow cytometry data was analyzed using FlowJo software (Tree Star, Inc.). Results are shown in FIG. 5-C.

TABLE 10
Vaccination scheme of Example 3.2

| | No. of | | | | RNA | | SEQ ID |
|---|---|---|---|---|---|---|---|
| Group | mice | Route | Dose | Volume | ID | Construct Design | NO: RNA |
| 1 | 6 | i.d. | — | 2 × 50 μl | — | RiLa (negative control) | |
| 2 | 6 | i.m. | 6 μg | 4 × 25 μl | — | Recombinant Rotavirus protein | |
| | | | | | | VP8*P[8] + Alum | |
| 3 | 12 | i.d. | 80 μg | 2 × 50 μl | R5480 | SP(HSA)-VP8*P[8](2-230) | 1891 |
| 4 | 12 | i.d. | 80 μg | 2 × 50 μl | R5482 | SP(HSA)-VP8*P[8](11-223) | 1892 |
| 5 | 12 | i.d. | 80 μg | 2 × 50 μl | R5484 | SP(HSA)-VP8*P[8](41-223) | 1893 |
| 6 | 12 | i.d. | 80 μg | 2 × 50 μl | R5486 | SP(HSA)-P2-VP8*P[8](41-223) | 1894 |
| 7 | 12 | i.d. | 80 μg | 2 × 50 μl | R5488 | SP(IgE)-P2-VP8*P[8](41-223) | 1880 |
| 8 | 12 | i.d. | 80 μg | 2 × 50 μl | R5470 | P2-VP8*[P8](65-223) | 1865 |

[0921] Results:

[0922] As shown in FIG. 5-A, statistically significant IgG1 and IgG2a responses compared to the negative control were detectable for all groups vaccinated with the mRNA vaccine encoding different VP8* antigen designs when recombinant Rotavirus protein P2-VP8*P[8] was used as a coating reagent.

[0923] FIG. 5-B shows cross-reactive responses in mice vaccinated with P[8] designs of group 3, 6 and 7 (see Table 10) with the recombinant Rotavirus protein P2-VP8*P[6] used as a coating reagent.

[0924] CD4 positive T cells play an important role in the immune system, particularly in the adaptive immune system. They help the activity of other immune cells by releasing T cell cytokines and are essential in B cell antibody class switching, in the activation and growth of cytotoxic T cells. An effective Rotavirus vaccine should induce CD4+ T cell responses. CD8+ T cells are a major protective immune mechanism against intracellular infections, like Rotavirus virus infections. An effective Rotavirus vaccine should also induce CD8+ T cells responses.

[0925] As shown in FIG. 5-C, statistically significant CD4 positive T cell responses were detectable for all groups vaccinated with the mRNA vaccine. Additionally Group 8 (see Table 10) shows CD8 positive T cell responses. Accordingly, these findings highlight one of the advantageous features of the inventive mRNA-based Rotavirus vaccine designs.

### Example 4: In Vitro Analysis of Expression of Different mRNA Design Encoding a Rotavirus Antigen

[0926] The present example shows that different mRNA constructs encoding a Rotavirus antigen were expressed in mammalian cells.

[0927] To determine in vitro protein expression of the RNA constructs, HEK 293T cells were transfected with unformulated mRNA encoding a Rotavirus antigen using Lipofectamine 2000. 24 h-48 h after transfection, cell lysates and cell culture supernatants were subjected to SDS-PAGE and Western blot analysis using rabbit anti-VP8*P[4] or anti-VP8*P[8] or antibody (1:1000; Aldevron) or mouse anti-alpha-tubulin antibody (1:1000; Abcam) as primary antibodies as well as goat anti-rabbit IgG IRDye®800CW or 680RD antibody (1:10000; Li-Cor) or goat anti-mouse IgG IRDye® 680RD or 800CW antibody (1:10000; Li-Cor) as secondary antibodies. Detection and quantification was performed using a Li-Cor detection system (Odyssey CLx image system) in combination with Image Studio Lite software. Table 11 contains mRNA constructs that were used in the experiment:

TABLE 11
RNA constructs used for Western blot analysis (Example 4)

| | RNA | | | | SEQ ID |
|---|---|---|---|---|---|
| Group | ID | mRNA design | Serotype | Construct design | NO: |
| 1 | R5470 | cap0 | P[8] | P2-Linker-VP8*(65-223) | 1865 |
| 2 | R8044 | cap1 | P[8] | P2-Linker-VP8*(65-223) | 1864 |
| 3 | R8046 | cap1 + poly(A) sequence, | P[8] | P2-Linker-VP8*(65-223) | 1865 |
| | | located at the 3′ terminus | | | |

[0928] Results:

[0929] Expression of all three mRNA constructs was demonstrated in the corresponding cell lysates (see FIG. 6). Best expression was detectable for cap1 mRNA designs (Group 2 and 3, Table 11).

### Example 5: Analysis of Different mRNA Designs Encoding a Rotavirus Antigen

[0930] Different mRNA constructs encoding a Rotavirus antigen (see Table X8) were prepared according to Example 1. The mRNA was formulated with LNPs (see Example 1.4.1 LNP formulation). The different mRNA vaccine candidates were applied on days 0 and 21 and administered intramuscular (i.m.) with 4 ug of RNA in mice as shown in Table 12. One negative control group (1) received an irrelevant mRNA. Blood samples were taken at day 21, 42, and 56 for determination of humoral immune responses.

[0931] ELISA was performed using recombinant Rotavirus protein P2-VP8*P[8] for coating. Coated plates were incubated using respective serum dilutions, and binding of specific antibodies to the recombinant Rotavirus protein P2-VP8*P[8] was detected using biotinylated isotype specific anti-mouse antibodies followed by streptavidin-HRP (horse radish peroxidase) with Amplex as substrate. Endpoint titers of antibodies (IgG1, IgG2a) directed against the recombinant Rotavirus protein P2-VP8*P[8] were measured by ELISA on day 21, 42, and 56 post vaccinations.

[0932] 5.1: In Vivo Analysis of Immunogenicity

[0933] Experimental setting described before in Example 5. Table 12 contains mRNA constructs that were used in the experiment.

TABLE 12
Vaccination scheme of Example 5

| | No. of | | | RNA | mRNA | Modified | | SEQ ID |
|---|---|---|---|---|---|---|---|---|
| Group | mice | Dose | Volume | ID | design | nucleotides | Construct design | NO: |
| 1 | 7 | 4 μg | 25 μl | — | — | — | Irrelevant RNA | 1884 |
| 2 | 7 | 4 μg | 25 μl | R5470 | cap0 | — | P2-Linker-VP8*(65-223) | 1865 |
| 3 | 7 | 4 μg | 25 μl | R8047 | cap0 | m1Ψ | P2-Linker-VP8*(65-223) | 1870 |
| 4 | 7 | 4 μg | 25 μl | R8044 | cap1(co- | — | P2-Linker-VP8*(65-223) | 1864 |
| | | | | | trans . . . cap) | | | |
| 5 | 7 | 4 μg | 25 μl | R8049 | cap1(co-trans. | m1Ψ | P2-Linker-VP8*(65-223) | 1868 |
| | | | | | cap) | | | |
| 6 | 7 | 4 μg | 25 μl | R8046 | cap1(enzym. | — | P2-Linker-VP8*(65-223) | 1865 |
| | | | | | cap) + poly(A) | | | |
| | | | | | sequence, | | | |
| | | | | | located at the | | | |
| | | | | | 3′ terminus | | | |
| 7 | 7 | 4 μg | 25 μl | R7411 | cap1 (enzym. | m1Ψ | P2-Linker-VP8*(65-223) | 1869 |
| | | | | | cap) + poly(A) | | | |
| | | | | | sequence, | | | |
| | | | | | located at the | | | |
| | | | | | 3′ terminus | | | |

[0934] Results:

[0935] As shown in FIG. 7, the cap1 mRNA designs (Group 4, 5, 6 and 7, Table 12) induced strong, humoral immune responses in mice (shown as IgG1 and IgG2a endpoint titers) compared to mRNA designs with cap0 (Group 2 and 3, Table 12). The mRNA designs with poly(A) sequences, located at the 3′ terminus (Group 6 and 7, FIG. 7) showed higher IgG responses compared to mRNA designs without an poly(A) sequence, located at the 3′ terminus (black bars, FIG. 7).

[0936] In addition mRNA designs comprising modified nucleotides (grey bars, FIG. 7) induced comparable humoral immune responses in mice compared to constructs comprising only natural nucleotides (black bars, FIG. 7).

[0937] Improvements of the mRNA design enhanced the immune responses to mRNA vaccine.

[0938] 5.2 Determination of Rotavirus Virus Neutralization Titers (VNTs)

[0939] Serum was collected on day 56 after vaccination described in Example 5 and Rotavirus neutralization titers were measured as described below. Table 12 contains mRNA constructs that were used in the experiment.

[0940] Diluted serum samples were incubated with a constant amount of Rotavirus virus strain Wa (G1P[8]) for 1 hour at 37° C., before transfer to a 96 well plate containing confluent MA104 cells. After 1 hour the monolayers were washed and incubated with the serum-virus mixture for 14-16 hours, frozen and thawed. VNTs were determined by measuring Rotavirus virus antigen in the lysed monolayers in wells receiving serum compared to viral control wells, using a standard enzyme-linked immunosorbent format. The neutralization titer represents a 60% reduction in the amount of virus.

[0941] Results:

[0942] As can be seen from FIG. 8 the mRNA designs with cap1 and poly(A) sequence, located at the 3′ terminus (Group 6 and 7, FIG. 8) induced robust virus neutralization antibody titers compared to the negative control. Without a poly(A) sequence, located at the 3′ terminus (Group 4 and 5, FIG. 8) a slight effect was detectable compared to the negative control (Group 1, FIG. 8).

### Example 6: Analysis of Different mRNA Designs Encoding a Rotavirus Antigen

[0943] 6.1: In Vitro Analysis of Expression

[0944] The present example shows that different mRNA constructs encoding a Rotavirus antigen were expressed in mammalian cells.

[0945] To determine in vitro protein expression of the RNA constructs, HEK 293T cells were transfected with unformulated mRNA encoding a Rotavirus antigen using Lipofectamine 2000. 24 h-48 h after transfection, cell lysates and cell culture supernatants were subjected to SDS-PAGE and Western blot analysis using rabbit anti-VP8* P[4 and 8] antibody (1:1000; Aldevron) or mouse anti-alpha-tubulin antibody (1:1000; Abcam) as primary antibodies as well as goat anti-rabbit IgG IRDye®800CW or 680RD antibody (1:10000; Li-Cor) or goat anti-mouse IgG IRDye® 680RD or 8000W antibody (1:10000; Li-Cor) as secondary antibodies. Detection and quantification was performed using a Li-Cor detection system (Odyssey CLx image system) in combination with Image Studio Lite software. Table 13 contains mRNA constructs that were used in the experiment.

TABLE 13
RNA constructs used for Western blot analysis (Example 6)

| | | | | 5′-cap structure/ | | |
|---|---|---|---|---|---|---|
| | | | | poly(A) sequence, | UTRs | |
| | No. of | RNA | | located at 3′ | 5′-UTR/ | SEQ ID |
| Group | mice | ID | Construct design | terminus | 3′-UTR | NO: |
| 1 | 7 | R8044 | P2-Linker-VP8*(65-223) | co-trans. cap/− | HSD17B4/PSMB3 | 1864 |
| 2 | 7 | R8134 | P2-Linker-VP8*(65-223) | co-trans. cap/+ | HSD17B4/PSMB3 | 1864 |
| | | | | (enzym. Poly(A)) | | |
| 3 | 7 | R8131 | P2-Linker-VP8*(65-223) | co-trans. cap/+ | HSD17B4/PSMB3 | 1862 or |
| | | | | (A100) | | 591 |
| 4 | 7 | R8135 | P2-Linker-VP8*(65-223) | enzym. cap/− | RPL32/ALB7 | 1865 |
| 5 | 7 | R8046 | P2-Linker-VP8*(65-223) | enzym. cap/+ | RPL32/ALB7 | 1865 |
| | | | | (enzym. Poly(A)) | | |
| 6 | 7 | R8138 | P2-Linker-VP8*(65-223) | enzym. cap/+ (A100) | RPL32/ALB7 | 1865 |

[0946] Results:

[0947] Expression of all six mRNA constructs was demonstrated in the corresponding cell lysates (see FIG. 9). Best expression was detectable for mRNA designs with a cap1 (co-trans. cap), UTR combination HSD17B4/PSMB3 and a poly(A) sequence, located at the 3′ terminus (Group 2 and 3, FIG. 9). mRNA designs with cap1 (enzym. cap), UTR combination RPL32/ALB7 without poly(A) sequence, located at the 3′ terminus (Group 4, FIG. 9) showed lower expression compared to the other mRNA designs.

[0948] 6.2: In Vivo Analysis of Immunogenicity

[0949] Different mRNA constructs encoding a Rotavirus antigen (see Table 14) were prepared according to Example 1. The mRNA was formulated with LNPs (see Example 1.4.1 LNP formulation). The different mRNA vaccine candidates were applied on days 0 and 21 and administered intramuscular (i.m.) with 4 ug of RNA as shown in Table 14. One negative control group (1) received Buffer and one positive control group (2) received recombinant Rotavirus protein P2-VP8*P[8]. Blood samples were taken at day 21, 42, and 56 for determination of humoral immune responses.

[0950] ELISA was performed using recombinant Rotavirus protein P2-VP8*P[8] for coating. Coated plates were incubated using respective serum dilutions, and binding of specific antibodies to the recombinant Rotavirus protein P2-VP8*P[8] was detected using biotinylated isotype specific anti-mouse antibodies followed by streptavidin-HRP (horse radish peroxidase) with Amplex as substrate. Endpoint titers of antibodies (IgG1, IgG2a) directed against the recombinant Rotavirus protein P2-VP8*P[8] were measured by ELISA on day 21, 42, and 56 post vaccinations.

TABLE 14
Vaccination scheme of Example 6.2

| | | | | | | 5′-cap | | | |
|---|---|---|---|---|---|---|---|---|---|
| | | | | | | structure/ | | | |
| | | | | | | poly(A) | | | |
| | | | | | | sequence, | UTRs | | |
| | No. of | | | RNA | Construct | located at 3′ | 5′-UTR/ | Modified | SEQ ID |
| Group | mice | Dose | Volume | ID | design | terminus | 3′-UTR | nucleotides | NO: |
| 1 | 6 | — | 25 μl | — | 0.9% NaCl | — | — | − | |
| | | | | | buffer, negative | | | | |
| | | | | | control | | | | |
| 2 | 6 | 6 μg | 4 × | — | Recombinant | — | — | − | |
| | | | 25 μl | | Rotavirus | | | | |
| | | | | | protein P2- | | | | |
| | | | | | VP8*P[8] + | | | | |
| | | | | | Alum | | | | |
| 3 | 7 | 4 μg | 25 μl | R8044 | P2-Linker- | co-trans. cap/− | HSD17B4/ | − | 1864 |
| | | | | | VP8*(65-223) | | PSMB3 | | |
| 4 | 7 | 4 μg | 25 μl | R8134 | P2-Linker- | co-trans. cap/+ | HSD17B4/ | − | 1864 |
| | | | | | VP8*(65-223) | (enzym. Poly(A)) | PSMB3 | | |
| 5 | 7 | 4 μg | 25 μl | R8131 | P2-Linker- | co-trans. cap/+ | HSD17B4/ | − | 1862 or |
| | | | | | VP8*(65-223) | (A100) | PSMB3 | | 591 |
| 6 | 7 | 4 μg | 25 μl | R8135 | P2-Linker- | enzym. cap/− | RPL32/ | − | 1865 |
| | | | | | VP8*(65-223) | | ALB7 | | |
| 7 | 7 | 4 μg | 25 μl | R8046 | P2-Linker- | enzym. cap/+ | RPL32/ | − | 1865 |
| | | | | | VP8*(65-223) | (enzym. Poly(A)) | ALB7 | | |
| 8 | 7 | 4 μg | 25 μl | R8138 | P2-Linker- | enzym. cap/+ | RPL32/ | − | 1865 |
| | | | | | VP8*(65-223) | (A100) | ALB7 | | |
| 9 | 7 | 4 μg | 25 μl | R8049 | P2-Linker- | co-trans. cap/− | HSD17B4/ | + | 1868 |
| | | | | | VP8*(65-223) | | PSMB3 | | |
| 10 | 7 | 4 μg | 25 μl | R8136 | P2-Linker- | co-trans. cap/+ | HSD17B4/ | + | 1868 |
| | | | | | VP8*(65-223) | (enzym. Poly(A)) | PSMB3 | | |
| 11 | 7 | 4 μg | 25 μl | R8133 | P2-Linker- | co-trans. cap/+ | HSD17B4/ | + | 1866 |
| | | | | | VP8*(65-223) | (A100) | PSMB3 | | |
| 12 | 7 | 4 μg | 25 μl | R8137 | P2-Linker- | enzym. cap/− | —/muag | + | 1869 |
| | | | | | VP8*(65-223) | | | | |
| 13 | 7 | 4 μg | 25 μl | R7411 | P2-Linker- | enzym. cap/+ | —/muag | + | 1869 |
| | | | | | VP8*(65-223) | (enzym. Poly(A)) | | | |

[0951] Results:

[0952] As shown in FIG. 10A, early humoral immune responses (day 21) were detectable for all groups with a poly(A) sequence, located at the 3′ terminus (Group 4, 5, 7, 8, 10, 11 and 13, FIG. 10A), independent of UTR combination (black bars, striped bars or dotted bars, FIG. 10A) and modification of nucleotides. At late time point (day 56), shown in FIG. 10B, nearly all mRNA designs showed high IgG1 and IgG2a endpoint titers. FIG. 10C shows that mRNA designs with co-transcriptional capping, a poly(A) sequence, located at 3′ terminus and UTR combination HSD17B4/PSMB3 (black bars, FIG. 10C) induced to an early time point (day 21) higher IgG1 and IgG2a titers compared to enzymatically capped mRNA designs with, a poly(A) sequence, located at 3′ terminus and other UTR combinations (striped bars, FIG. 10C). This effect was independently of modified nucleotides. At day 56 shown in FIG. 10D all mRNA designs induced high humoral immune responses with a slight trend of higher responses for mRNA designs with co-transcriptional capping, a poly(A) sequence, located at 3′ terminus and UTR combination HSD17B4/PSMB3.

[0953] Early immune responses are very important for a fast and robust protection against Rotavirus virus infections. The high titers in later time points show that this immune response resulting from mRNA vaccination can be boosted.

[0954] 6.3 Determination of Rotavirus Virus Neutralization Titers (VNTs)

[0955] Serum was collected on day 56 after vaccination described in Example 6.2 and Rotavirus neutralization titers were measured as described below. Table 14 contains mRNA constructs that were used in the experiment.

[0956] Diluted serum samples were incubated with a constant amount of Rotavirus virus strain Wa (G1P[8]) for 1 hour at 37° C., before transfer to a 96 well plate containing confluent MA104 cells. After 1 hour the monolayers were washed and incubated with the serum-virus mixture for 14-16 hours, frozen and thawed. VNTs were determined by measuring Rotavirus virus antigen in the lysed monolayers in wells receiving serum compared to viral control wells, using a standard enzyme-linked immunosorbent format. The neutralization titer represents a 60% reduction in the amount of virus.

[0957] Results:

[0958] FIG. 11 shows that all mRNA designs with a poly(A) sequence, located at the 3′ terminus (Group 4, 5, 7, 8, 10, 11 and 13, FIG. 11) induced the formation of Rotavirus specific functional antibodies in mice as shown by high virus neutralizing antibody titers. For the Alum adjuvanted recombinant Rotavirus protein VP8*P[8] no VNT titer could be detected. mRNA designs with co-transcriptional capping, a poly(A) sequence, located at 3′ terminus and UTR combination HSD17B4/PSMB3 (Group 4 and 10, FIG. 11) induced higher VNT titers compared to enzymatically capped mRNA designs (Group 7 and 13, FIG. 11). This effect was independent of modified nucleotides.

[0959] 6.4: In Vivo Analysis of Cytokines

[0960] Appropriate dilutions of sera collected 14 hours after prime immunization (see Example 6.2) were analyzed by a mouse IFN-alpha ELISA kit according to the manufacturer's protocol (PBL, cat.: 42115-1). Table 14 contains mRNA constructs that were used in the experiment.

[0961] Results:

[0962] The recombinant Rotavirus protein P2-VP8*P[8] (Group 2, see FIG. 12) and Groups with modified nucleotides (Group 9, 10, 11, 12 and 13, see Table 14) showed no increased INF alpha levels. Group 6, 7 and 8 induced strong INFalpha levels compared to group Group 3, 4 and 5, which showed only a moderate increasing of INFalpha levels in the sera.

[0963] INFalpha has a main role in the immune response against viruses. It activates immune cells, such as natural killer cells and macrophages, increases host defenses by up-regulating antigen presentation by increasing the expression of major histocompatibility complex (MHC) antigens. This activation of the innate immune system can be seen as supportive for the subsequent development of a strong adaptive immune response. However, high levels of INFalpha can lead to fever, muscle pain and flu like symptoms. Therefore a moderate increasing of INFalpha could be marker for an optimal immune response to a vaccine against a Rotavirus virus infection.

[0964] 6.5 Intracellular Cytokine Staining (ICS):

[0965] Splenocytes from vaccinated mice (see Example 6.2) were isolated on day 71 according to a standard protocol known in the art. Briefly, isolated spleens were grinded through a cell strainer and washed in PBS/1% FBS followed by red blood cell lysis. After an extensive washing step with PBS/1% FBS, splenocytes were seeded into 96-well plates (2×10⁶ cells per well). Cells were stimulated with a mixture of Rotavirus VP8* peptides (see Table 9) (5 ug/ml each) in the presence of 2.5 ug/ml each of an anti-CD28 antibody (BD Biosciences) and a protein transport inhibitor for 6 h at 37° C. After stimulation, cells were washed and stained for intracellular cytokines using the Cytofix/Cytoperm reagent (BD Biosciences) according to the manufacturer's instructions. The following antibodies were used for staining: Thy1.2-FITC (1:200), CD8-APC-H7 (1:100), TNF-PE (1:100), IFNγ-APC (1:100) (eBioscience), CD4-BD Horizon V450 (1:200) (BD Biosciences) and incubated with Fcγ-block diluted 1:100. Aqua Dye was used to distinguish live/dead cells (Invitrogen). Cells were acquired using a BD FACS Canto II flow cytometer (Beckton Dickinson). Flow cytometry data was analyzed using FlowJo software (Tree Star, Inc.). Results are shown in FIG. 13.

[0966] Results:

[0967] Groups contained mRNA designs with co-transcriptional capping, a poly(A) sequence, located at 3′ terminus and a UTR combination HSD17B4/PSMB3 (Group 4, 5, 10 and 11, see FIG. 13) induced higher cellular immune responses of CD8 positive T-cells compared to the other groups. All groups of Rotavirus vaccines with a poly(A) sequence, located at 3′ terminus showed higher cellular immune responses of CD4 positive T-cells compared to the recombinant Rotavirus protein P2-VP8*P[8]+Alum (Group 2, see FIG. 13). In addition nearly all groups with a poly(A) sequence, located at 3′ terminus, induced slightly higher immune responses compared to the groups without a poly(A) sequence, located at 3′ terminus (Group 3, 6 and 12, see FIG. 13).

### Example 7: Clinical Development of a Rotavirus mRNA Vaccine

[0968] To demonstrate safety and efficacy of the Rotavirus mRNA vaccine, a double blind, randomised, placebo controlled, dose escalation clinical trial will be initiated.

[0969] For clinical development, mRNA produced under GMP conditions (e.g. using a procedure as described in WO2016/180430) will be used.

[0970] First in Human exposure would most likely be performed in healthy young adults, to establish safety/tolerability and immunogenicity of the candidate vaccine. In an example of a subsequent clinical trial a cohort of healthy HIV uninfected toddlers (aged 1 to <3 years) and infants (aged 6 to <8 weeks) without previous rotavirus vaccination, is intramuscularly injected with the Rotavirus mRNA vaccine. Exclusion criteria can include acute illness at time of enrolment, presence of malnutrition or any systemic disorder, congenital defects, known or suspected impaired immunological function and immunoglobulin therapy or chronic immunosuppressant medications.

[0971] The dose escalation phase can be designed to test 2 ug to 200 ug dose levels of vaccine, depending on non-clinical data and clinical data with related vaccines at the time, first in toddlers and then in infants. Toddlers and infants are randomly assigned to receive vaccine or placebo, beginning with the lowest dose. Toddlers in the dose escalation phase of the trial receive up to three intramuscular injections of vaccine or placebo in the anterolateral thigh in a 2 to 8 weeks interval. Infants in the dose escalation phase and the expanded cohort receive three intramuscular injections at 2 to 8-week intervals of vaccine or placebo.

[0972] Infants also receive three doses of the oral Rotarix rotavirus vaccine (GlaxoSmithKline, Rixensart, Belgium) as part of this study, at 4, 8, and 12 weeks after the third study injection. Participants are observed for at least 30 min after administration of each injection.

[0973] The primary objectives are to assess the safety and reactogenicity of the Rotavirus mRNA vaccine at escalating doses in toddlers and infants, and to investigate the immunogenicity at different doses.

[0974] Primary safety endpoints are local and systemic reactions within 7 days after each injection, adverse events within 28 days after each injection, and all serious adverse events, assessed in toddlers and infants who receive at least one dose. Primary immunogenicity endpoints are IgA and IgG titers against P2-VP8 and neutralising antibody sera responses and geometric mean titers 4 weeks after third injection. Therefore serum is collected at baseline, after each vaccination and after the final study injection.

[0975] The secondary objective is to assess the effect of Rotavirus mRNA vaccination on shedding of Rotarix vaccine virus subsequently administered in infants, with the endpoint being the proportion of infants shedding rotavirus (determined by ELISA) at 5, 7, or 9 days after administration of the first dose of Rotarix (4 weeks after the third Rotavirus mRNA or placebo injection). Therefore stool samples are collected from infants at 5, 7, and 9 days after the first dose of Rotarix and tested for the presence of rotavirus using e.g. the commercially available ProsPecT Rotavirus Microplate Assay (Oxoid Ltd, Ely, UK), according to the manufacturer's instructions.

[0976] Subsequent phase 2b/3 trials would follow to assess efficacy in larger populations, also including specific at-risk populations such as, e.g., HIV positive and malnourished infants.

### Example 8: Analysis of Different mRNA Designs Encoding a Rotavirus Antigen

[0977] The present example shows that Rotavirus VP8* mRNA vaccines encoding different antigen designs with modified or unmodified nucleotides induce humoral immune responses in guinea pigs. Binding antibodies were measured using ELISA and virus-neutralizing antibodies to a homologous strain (Wa(G1P[8]), the vaccine strain were analyzed.

[0978] mRNA constructs encoding a P2-linker-VP8* (65-223) construct containing either natural nucleotides or modified nucleotides (m1Ψ or Ψ). The constructs were prepared according to Example 1. The mRNAs were formulated with LNPs (see Example 1.4.1 LNP formulation). The different mRNA vaccine candidates (see Table 15) were applied on day 0 and 21 and administered intramuscular (i.m.) with different doses of RNA. Blood samples were taken at day 1, 21, 42, and 56 for determination of humoral immune responses.

[0979] Groups 1, 2, 6, 8 and 10 were selected for longevity testing with additional serum sampling time points at day 84, 112 and 140.

TABLE 15
Vaccination scheme of Example 8

| | | | | | | | 5′-cap | | | |
|---|---|---|---|---|---|---|---|---|---|---|
| | | | | | | | structure/ | | | |
| | | | | | | | Poly(A) | | | |
| | No. of | | | | | | sequence, | UTRs | | |
| | guinea | | | | RNA | Construct | located at 3′ | 5′-UTR/ | Modified | SEQ ID |
| Group | pigs | Dose | | Volume | ID | design | terminus | 3′-UTR | nucleotides | NO: |
| 1 | 7 | — | | 100 μl | — | 0.9% NaCl | — | — | — | — |
| | | | | | | buffer, negative | | | | |
| | | | | | | control | | | | |
| 2 | 7 | 20 | μg | 2 × | — | Recombinant | — | — | — | — |
| | | | | 167 μl | | Rotavirus | | | | |
| | | | | | | protein P2-VP8* | | | | |
| | | | | | | P[8] + Alum | | | | |
| 3 | 7 | 8 | μg | 100 μl | R8628 | P2-Linker- | co-trans. | HSD17B4/ | — | 1863 or |
| | | | | | | VP8*(65-223) | cap/A100 | PSMB3 | | 1167 |
| 4 | 7 | 6 | μg | 100 μl | R8575 | P2-Linker- | co-trans. | HSD17B4/ | m1Ψ | 1863 or |
| | | | | | | VP8*(65-223) | cap/A100 | PSMB3 | | 1167 |
| 5 | 7 | 6 | μg | 100 μl | R8576 | P2-Linker- | co-trans. | HSD17B4/ | Ψ | 1863 or |
| | | | | | | VP8*(65-223) | cap/A100 | PSMB3 | | 1167 |
| 6 | 7 | 25 | μg | 100 μl | R8628 | P2-Linker- | co-trans. | HSD17B4/ | — | 1863 or |
| | | | | | | VP8*(65-223) | cap/A100 | PSMB3 | | 1167 |
| 7 | 7 | 25 | μg | 100 μl | R8131 | P2-Linker- | co-trans. | HSD17B4/ | — | 1862 or |
| | | | | | | VP8*(65-223) | cap/A100 | PSMB3 | | 591 |
| 8 | 7 | 25 | μg | 100 μl | R8575 | P2-Linker- | co-trans. | HSD17B4/ | m1Ψ | 1863 or |
| | | | | | | VP8*(65-223) | cap/A100 | PSMB3 | | 1167 |
| 9 | 7 | 25 | μg | 100 μl | R8629 | P2-Linker- | co-trans. | HSD17B4/ | m1Ψ | 1867 |
| | | | | | | VP8*(65-223) | cap/A100 | PSMB3 | | |
| 10 | 7 | 25 | μg | 100 μl | R8576 | P2-Linker- | co-trans. | HSD17B4/ | Ψ | 1863 or |
| | | | | | | VP8*(65-223) | cap/A100 | PSMB3 | | 1167 |
| 11 | 7 | 100 | μg | 100 μl | R8628 | P2-Linker- | co-trans. | HSD17B4/ | — | 1863 or |
| | | | | | | VP8*(65-223) | cap/A100 | PSMB3 | | 1167 |
| 12 | 7 | 100 | μg | 100 μl | R8575 | P2-Linker- | co-trans. | HSD17B4/ | m1Ψ | 1863 or |
| | | | | | | VP8*(65-223) | cap/A100 | PSMB3 | | 1167 |
| 13 | 7 | 100 | μg | 100 μl | R8576 | P2-Linker- | co-trans. | HSD17B4/ | Ψ | 1863 or |
| | | | | | | VP8*(65-223) | cap/A100 | PSMB3 | | 1167 |

[0980] 8.1. Determination of Specific Humoral Immune Responses by ELISA:

[0981] ELISA was performed using recombinant Rotavirus protein P2-VP8*P[8] for coating. Coated plates were incubated using respective serum dilutions, and binding of specific antibodies to the recombinant Rotavirus protein P2-VP8*P[8] was detected using biotinylated isotype-specific anti-guinea pig antibodies followed by streptavidin-HRP (horse radish peroxidase) with Amplex as substrate. Endpoint titers of antibodies (IgG) directed against the recombinant Rotavirus protein P2-VP8*P[8] were measured by ELISA on day 21, 42, and 56 post prime vaccinations for all groups and for groups 1, 2, 6, 8 and 10 also at day 84, 112 and 140. Results are shown in FIGS. 14 A-C (for days 21, 42, 56) and FIG. 15 (also for later time points).

[0982] 8.2 Determination of Virus-Neutralizing Antibody Titers (VNTs) Against Rotavirus

[0983] Serum samples were collected on day 56 after prime vaccination described in Example 5 and virus-neutralizing antibody titers against Rotavirus were measured as described below.

[0984] Diluted serum samples were incubated with a constant amount of Rotavirus virus strain Wa (G1P[8]) for 1 hour at 37° C., before transfer to a 96 well plate containing confluent MA104 cells. After 1 hour the monolayers were washed and incubated with the serum-virus mixture for 14-16 hours, frozen and thawed. VNTs were determined by measuring Rotavirus virus antigen in the lysed monolayers in wells receiving serum compared to viral control wells, using a standard enzyme-linked immunosorbent format. The neutralization titer represents a 60% reduction in the amount of virus. Results are shown in FIG. 14 D.

[0985] Results

[0986] As shown in FIG. 14 A-C, the different Rotavirus antigen constructs induced strong, humoral immune responses in guinea pigs in a dose dependent manner. There were no differences between natural or modified nucleotides detectable.

[0987] As shown in FIG. 14 D all groups induced functional antibodies against the Rotavirus strain Wa (G1P[8]).

[0988] As shown in FIG. 15, the IgG levels of all tested groups remained stable between day 42 and day 140. There were no differences between natural or modified nucleotides detectable.

### Example 9: Analysis of Different Rotavirus Antigen Designs in Combination with Different mRNA Designs

[0989] The present example shows different that Rotavirus mRNA vaccines encoding different antigen designs induce humoral immune responses in guinea pigs. Binding antibodies were measured using ELISA and virus-neutralizing antibodies to homolgous and heterologous strain were analyzed.

[0990] mRNA constructs encoding different VP8* constructs were prepared according to Example 1. The mRNAs were formulated with LNPs (see Example 1.4.1 LNP formulation). The different mRNA vaccine candidates (see Table 16) were applied on day 0 and 21 and administered intramuscular (i.m.) with different doses of RNA. Blood samples were taken at day 1, 21, 42, and 56 for determination of humoral immune responses.

[0991] Group 1, 2, 7, 8, 9 and 10 were selected for longevity testing with additional serum sampling time points at day 84, 112, 140, 168 and 196.

TABLE 16
Vaccination scheme of Example 9

| | | | | | | | 5′-cap | | |
|---|---|---|---|---|---|---|---|---|---|
| | | | | | | | structure/ | | |
| | | | | | | | poly(A) | | |
| | No. of | | | | | | sequence, | UTRs | |
| | guinea | | | | RNA | | located at 3′ | 5′-UTR/ | SEQ ID |
| Group | pigs | Dose | | Volume | ID | Construct design | terminus | 3′-UTR | NO: |
| 1 | 8 | — | | 100 μl | — | 0.9% NaCl buffer, | — | — | — |
| | | | | | | negative control | | | |
| 2 | 8 | 20 | μg | 2 × | — | Recombinant Rotavirus | — | — | — |
| | | | | 167 μl | | protein P2-VP8*P(8] + | | | |
| | | | | | | Alum | | | |
| 3 | 8 | 6 | μg | 100 μl | R8628 | P2-Linker-VP8*(65- | co-trans. | HSD17B4/ | 1863 or |
| | | | | | | 223) | cap/A100 | PSMB3 | 1167 |
| 4 | 8 | 6 | μg | 100 μl | R8577 | P2-Linker-VP8*(65- | co-trans. | HSD17B4/ | 1873 or |
| | | | | | | 223)-Linker-Ferritin | cap/A100 | PSMB3 | 1185 |
| 5 | 8 | 6 | μg | 100 μl | R8578 | LumSynt-Linker-P2- | co-trans. | HSD17B4/ | 1876 or |
| | | | | | | Linker-VP8*(41-223) | cap/A100 | PSMB3 | 1212 |
| 6 | 8 | 6 | μg | 100 μl | R8579 | SP(IgE)-P2-Linker- | co-trans. | HSD17B4/ | 1879 or |
| | | | | | | VP8*(41-223) | cap/A100 | PSMB3 | 1230 |
| 7 | 8 | 25 | μg | 100 μl | R8628 | P2-Linker-VP8*(65- | co-trans. | HSD17B4/ | 1863 or |
| | | | | | | 223) | cap/A100 | PSMB3 | 1167 |
| 8 | 8 | 25 | μg | 100 μl | R8577 | P2-Linker-VP8*(65- | co-trans. | HSD17B4/ | 1873 or |
| | | | | | | 223)-Linker-Ferritin | cap/A100 | PSMB3 | 1185 |
| 9 | 8 | 25 | μg | 100 μl | R8578 | LumSynt-Linker-P2- | co-trans. | HSD17B4/ | 1876 or |
| | | | | | | Linker-VP8*(41-223) | cap/A100 | PSMB3 | 1212 |
| 10 | 8 | 25 | μg | 100 μl | R8579 | SP(IgE)-P2-Linker- | co-trans. | HSD17B4/ | 1879 or |
| | | | | | | VP8*(41-223) | cap/A100 | PSMB3 | 1230 |

[0992] 9.1. Determination of Specific Humoral Immune Responses by ELISA:

[0993] ELISA was performed using recombinant Rotavirus protein P2-VP8*P[8] for coating. Coated plates were incubated using respective serum dilutions, and binding of specific antibodies to the recombinant Rotavirus protein P2-VP8*P[8] was detected using biotinylated isotype specific anti-guinea pig antibodies followed by streptavidin-HRP (horse radish peroxidase) with Amplex as substrate. Endpoint titers of antibodies (IgG) directed against the recombinant Rotavirus protein P2-VP8*P[8] were measured by ELISA on day 21, 42, and 56 post prime vaccinations for all groups and for group 1, 2, 7, 8, 9 and 10 also at day 84, 112, 140, 168 and 196. Results are shown in FIGS. 16 A-C and FIG. 17.

[0994] Endpoint titers of antibodies (IgA) directed against the recombinant Rotavirus protein P2-VP8*P[8] were measured by ELISA on day 56 post prime vaccinations for all groups. Results are shown in FIG. 16D.

[0995] 9.2 Determination of Virus-Neutralizing Antibody Titers (VNTs) Against Rotavirus Serum samples were collected on day 56 after prime vaccination described in Example 5 and virus-neutralizing antibody titers against Rotavirus were measured as described below.

[0996] Diluted serum samples were incubated with a constant amount of Rotavirus virus strain Wa (G1P[8]), 1076 (G2P[6]) or DS-1 (G2P[4]) for 1 hour at 37° C., before transfer to a 96 well plate containing confluent MA104 cells. After 1 hour the monolayers were washed and incubated with the serum-virus mixture for 14-16 hours, frozen and thawed. VNTs were determined by measuring Rotavirus virus antigen in the lysed monolayers in wells receiving serum compared to viral control wells, using a standard enzyme-linked immunosorbent format. The neutralization titer represents a 60% reduction in the amount of virus. Results are shown in FIG. 18.

[0997] Results

[0998] As shown in FIG. 16, the different Rotavirus antigen constructs induced strong, humoral immune responses in guinea pigs. The Lumazine synthase construct (group 5 and 9, FIG. 16A) induced higher IgG immune response at day 21 than the recombinant Rotavirus protein P2-VP8*P[8]+Alum (Group 2, see FIG. 16A) The lumazine synthase P2-VP8*P[8] mRNA vaccine induced significant higher IgG immune response than the P2-VP8*P[8] mRNA vaccine at all days (Group 5 and 9 compared to Groups 3 and 7, FIGS. 16A-C).

[0999] As shown in FIG. 17 the IgG levels of the groups remained stable between day 42 and day 196. The anti-VP8* serum IgG level for the lumazine synthase P2-VP8*P[8] mRNA vaccine increased at very early time point and remained the most prominent over time.

[1000] As shown in FIG. 16D, as expected for parenteral vaccination, the serum IgA levels were lower than the IgG levels, but for the recombinant Rotavirus protein P2-VP8*P[8]+Alum (Group 2) and the lumazine synthase P2-VP8* P[8] mRNA vaccine (Groups 5 and 9) the levels were significantly increased compared to the negative control group (Group 1).

[1001] As shown in FIG. 18A the recombinant Rotavirus protein P2-VP8*P[8]+Alum (Group 2) and the lumazine synthase P2-VP8*P[8] mRNA vaccine (Groups 5 and 9) induced high VNTs against the homologous Rotavirus strain Wa(G1P[8]), but there was no significant difference between these two constructs. The lumazine synthase P2-VP8* P[8] mRNA vaccine was superior compared to the P2-VP8*P[8] mRNA vaccine (Group 3 and 7). As shown in FIGS. 18B-C the recombinant Rotavirus protein P2-VP8*P[8]+Alum (Group 2) had no or only weak heterologous functional antibody responses against the heterologous Rotavirus strain 1076 (G2P[6]) or DS-1 (G2P[4]). In contrast, the lumazine synthase-P2-VP8* P[8] (Group 5 and 9) and the IgE-P2-VP8*P[8](Group 10) mRNA vaccine induced high levels of virus neutralizing antibodies against both heterologous Rotavirus strains (even against the more distantly related P[6] strain).

[1002] For the homologous VNT responses (FIG. 18A) only a slight dose response was visible, but for the heterologous VNT responses a dose response was detectable (FIG. 18B-C).

### Example 10: Analysis of Multivalent Rotavirus Antigen Vaccine

[1003] The present example shows different mRNA vaccines encoding different Rotavirus serotypes and combinations that induce humoral immune responses in guinea pigs. Binding antibodies will be measured using ELISA and moreover virus neutralizing antibodies to the vaccine strain will be analysed.

[1004] mRNA constructs encoding VP8* of different Rotavirus serotypes are prepared according to Example 1. The mRNAs are formulated with LNPs (see Example 1.4.1 LNP formulation). The different mRNA vaccines (see Table 17) are applied on day 0 and 21 and administered intramuscular (i.m.) with different doses of RNA. Blood samples are taken at day 1, 21, 42, and 56 for determination of humoral immune responses.

TABLE 17
Vaccination scheme of Example 10

| | No. of | | Modified |
|---|---|---|---|
| Group | guinea pigs | Rotavirus Serotype | nucleotides |
| 1 | 8 | 0.9% NaCl buffer, negative control | — |
| 2 | 8 | Recombinant Rotavirus protein | — |
| | | P2-VP8*P[8] + Alum | |
| 3 | 8 | VP8* construct P[4] | — |
| 4 | 8 | VP8* construct P[6] | — |
| 5 | 8 | VP8* construct P[8] | — |
| 6 | 8 | VP8* construct combination of P[4], | — |
| | | P[6], P[8] | |
| 7 | 8 | VP8* construct P[4] | m1Ψ |
| 8 | 8 | VP8* construct P[4] | m1Ψ |
| 9 | 8 | VP8* construct P[4] | m1Ψ |
| 10 | 8 | VP8* construct combination of P[4], | m1Ψ |
| | | P[6], P[8] | |
| 11 | 8 | VP8* construct P[4] | Ψ |
| 12 | 8 | VP8* construct P[4] | Ψ |
| 13 | 8 | VP8* construct P[4] | Ψ |
| 14 | 8 | VP8* construct combination of P[4], | Ψ |
| | | P[6], P[8] | |

### Example 11: Analysis of Multivalent Rotavirus Antigen Vaccine with Different Ratios

[1005] The present example shows different mRNA vaccine combinations encoding different Rotavirus serotypes with different ratios that induce humoral immune responses in guinea pigs. Binding antibodies will be measured using ELISA and moreover virus neutralizing antibodies to the vaccine strain will be analyzed.

[1006] mRNA constructs encoding VP8* of different Rotavirus serotypes are prepared according to Example 1. The mRNAs are formulated with LNPs (see Example 1.4.1 LNP formulation). The different mRNA vaccines (see Table 18) are applied on day 0 and 56 and administered intramuscular (i.m.) with different doses of RNA. Blood samples are taken at day 1, 28, 56 and 84 for determination of humoral immune responses.

TABLE 18
Vaccination scheme of Example 11

| | No. of | | |
|---|---|---|---|
| Group | guinea pigs | Rotavirus Serotype | Ratios |
| 1 | 8 | 0.9% NaCl buffer, negative control | — |
| 2 | 8 | Recombinant Rotavirus protein P2-VP8*P[8] + Alum | — |
| 3 | 8 | VP8* construct combination of P[4], P[6], P[8] | Ratio1 |
| 4 | 8 | VP8* construct combination of P[4], P[6], P[8] | Ratio2 |
| 5 | 8 | VP8* construct combination of P[4], P[6], P[8] | Ratio3 |
| 6 | 8 | VP8* construct combination of P[4], P[6], P[8] | Ratio4 |
| 7 | 8 | VP8* construct combination of P[4], P[6], P[8] | Ratio5 |
| 8 | 8 | VP8* construct combination of P[4], P[6], P[8] | Ratio6 |
| 9 | 8 | VP8* construct combination of P[4], P[6], P[8] | Ratio7 |
| 10 | 8 | VP8* construct combination of P[4], P[6], P[8] | Ratio8 |

### Example 12: Analysis and Challenge of Multivalent Rotavirus Antigen Vaccine

[1007] The present example shows different mRNA vaccine combinations encoding different Rotavirus serotypes with two different doses that induce protective immune responses in gnotobiotic pigs. Binding antibodies are measured using ELISA and moreover virus-neutralizing antibodies to the vaccine strain is analysed.

[1008] mRNA constructs encoding VP8* constructs of different Rotavirus P-serotypes are prepared according to Example 1. The mRNAs are formulated with LNPs (see Example 1.4.1 LNP formulation). The different mRNA vaccines (see Table 19) are applied on day 0, 14 and 28 and administered intramuscular (i.m.) with two different doses of RNA. Blood samples are taken at day 1, 14, 28, 35, and 42 for determination of humoral immune responses. To test the protective efficacy of the mRNA vaccines, an oral challenge with Rotavirus Wa (G1P[8]) will be performed at day 35. To assess the effect of Rotavirus mRNA vaccination on shedding of virus, stool samples are collected from pigs at day 35 to 42.

TABLE 19
Vaccination scheme of Example 12

| | No. of | | | |
|---|---|---|---|---|
| Group | guinea pigs | Dosis | Rotavirus Serotype | Challenge |
| 1 | 7 | — | 0.9% NaCl buffer, negative control | Rotavirus Wa |
| | | | | (G1P[8] strain) |
| 2 | 7 | 3 × 30 μg | Trivalent recombinant Rotavirus protein P2-VP8* P[8], | Rotavirus Wa |
| | | | P[6], P[4] + Alum | (G1P[8] strain) |
| 3 | 7 | Dose 1 | VP8* mRNA construct 1 combination of P[4], P[6], | Rotavirus Wa |
| | | | P[8] | (G1P[8] strain) |
| 4 | 7 | Dose 1 | VP8* construct 2 combination of P[4], P[6], P[8] | Rotavirus Wa |
| | | | | (G1P[8] strain) |
| 5 | 7 | Dose 2 | VP8* construct 2 combination of P[4], P[6], P[8] | Rotavirus Wa |
| | | | | (G1P[8] strain) |

### Example 13: Analysis of Trivalent Rotavirus Antigen Vaccine with Different Candidates

[1009] The present example shows trivalent mRNA vaccine combinations encoding different Rotavirus serotypes always with a 1:1:1 ratio that are tested for their capacity to induce humoral immune responses in guinea pigs. Binding antibodies are measured using ELISA and moreover virus-neutralizing antibodies to the vaccine strain are analyzed.

[1010] mRNA constructs encoding VP8* of different Rotavirus serotypes are prepared according to Example 1. The mRNAs are formulated with LNPs (see Example 1.4.1 LNP formulation). The different mRNA vaccines are applied at two or three time points and administered intramuscular (i.m.) to seven guinea pigs per group with different doses of RNA (see Table 20). Blood samples are taken at day 1, 21/22, 42 and 70 for determination of humoral immune responses.

TABLE 20
Vaccination scheme of Example 13

| | | | | | | 5′-cap | | |
|---|---|---|---|---|---|---|---|---|
| | | | | | | structure/ | | |
| | | | | | | poly(A) | | |
| | | | | | | sequence, | UTRs | |
| | | RNA | Construct | | Serum | located at 3′ | 5′-UTR/ | SEQ ID |
| Group | Dose | ID | design | Immunization | samples | terminus | 3′-UTR | NO: |
| 1 | 100 μl | — | 0.9% NaCl | d 0, d 21, | d 1, d 21, | — | — | — |
| | | | buffer, negative | d 42 | d 42, d 70 | | | |
| | | | control | | | | | |
| 2 | 1 × | — | Monovalent rec. | d 0, d 21, | d 1, d 21, | — | — | — |
| | 20 μg | | Rotavirus | d 42 | d 42, d 70 | | | |
| | | | protein P2- | | | | | |
| | | | VP8*P[8] + | | | | | |
| | | | Alum | | | | | |
| 3 | 3 × | — | Trivalent rec. | d 21, d 42 | d 22, d 42, | — | — | — |
| | 6.7 μg | | Rotavirus | | d 70 | | | |
| | | | protein P2- | | | | | |
| | | | VP8*P[8], P[6], | | | | | |
| | | | P[4] + Alum | | | | | |
| 4 | 3 × | — | Trivalent rec. | d 0, d 21, | d 1, d 21, | — | — | — |
| | 6.7 μg | | Rotavirus | d 42 | d 42, d 70 | | | |
| | | | protein P2- | | | | | |
| | | | VP8*P[8], P[6], | | | | | |
| | | | P[4] + Alum | | | | | |
| 5 | 1 × | R8628 | P2-Linker- | d 0, d 21, | d 1, d 21, | co-trans. | HSD17B4/ | 1863 or |
| | 25 μg | | VP8*(65-223) | d 42 | d 42, d 70 | cap/A100 | PSMB3 | 1167 |
| | | | P[8] | | | | | |
| 6 | 1 × | R9077 | P2-Linker- | d 0, d21, | d 1, d 21, | co-trans. | HSD17B4/ | 1922 |
| | 25 μg | | VP8*(65-223) | d42 | d 42, d 70 | cap/A100 | PSMB3 | |
| | | | P[6] | | | | | |
| 7 | 1 × | R9078 | P2-Linker- | d 0, d 21, | d 1, d 21, | co-trans. | HSD17B4/ | 1921 |
| | 25 μg | | VP8*(65-223) | d 42 | d 42, d 70 | cap/A100 | PSMB3 | |
| | | | P[4] | | | | | |
| 8 | 3 × | R8628 + | Trivalent P2- | d 21, d 42 | d 22, d 42, | co-trans. | HSD17B4/ | 1863 or |
| | 8.3 μg | R9077 + | Linker-VP8*(65-223) | | d 70 | cap/A100 | PSMB3 | 1167, |
| | | R9078 | P[8, | | | | | 1922, |
| | | | P[6], P[4]] | | | | | 1921 |
| 9 | 3 × | R8628 + | Trivalent P2- | d 0, d 21, | d 1, d 21, | co-trans. | HSD17B4/ | 1863 or |
| | 8.3 μg | R9077 + | Linker-VP8*(65-223) | d 42 | d 42, d 70 | cap/A100 | PSMB3 | 1167, |
| | | R9078 | P[8, | | | | | 1922, |
| | | | P[6], P[4] | | | | | 1921 |
| 10 | 1 × | R8578 | LumSynt-Linker- | d 0, d 21, | d 1, d 21, | co-trans. | HSD17B4/ | 1876 or |
| | 25 μg | | P2-Linker- | d 42 | d 42, d 70 | cap/A100 | PSMB3 | 1212 |
| | | | VP8*(41-223) | | | | | |
| | | | P[8] | | | | | |
| 11 | 1 × | R9091 | LumSynt-Linker- | d 0, d 21, | d 1, d 21, | co-trans. | HSD17B4/ | 1924 |
| | 25 μg | | P2-Linker- | d 42 | d 42, d 70 | cap/A100 | PSMB3 | |
| | | | VP8*(41-223) | | | | | |
| | | | P[6] | | | | | |
| 12 | 1 × | R9092 | LumSynt-Linker- | d 0, d 21, | d 1, d 21, | co-trans. | HSD17B4/ | 1923 |
| | 25 μg | | P2-Linker- | d 42 | d 42, d 70 | cap/A100 | PSMB3 | |
| | | | VP8*(41-223) | | | | | |
| | | | P[4] | | | | | |
| 13 | 3 × | R8578, | Trivalent | d 21, d 42 | d 22, d 42, | co-trans. | HSD17B4/ | 1876 or |
| | 1 μg | R9091, | LumSynt-Linker- | | d 70 | cap/A100 | PSMB3 | 1212, |
| | | R9092 | P2-Linker- | | | | | 1924, |
| | | | VP8*(41-223) | | | | | 1923 |
| | | | P[8], P[6], | | | | | |
| | | | P[4] | | | | | |
| 14 | 3 × | R8578, | Trivalent | d 0, d 21, | d 1, d 21, | co-trans. | HSD17B4/ | 1876 or |
| | 1 μg | R9091, | LumSynt-Linker- | d 42 | d 42, d 70 | cap/A100 | PSMB3 | 1212, |
| | | R9092 | P2-Linker- | | | | | 1924, |
| | | | VP8*(41-223) | | | | | 1923 |
| | | | P[8], P[6], | | | | | |
| | | | P[4] | | | | | |
| 15 | 3 × | R8578, | Trivalent | d 21, d 42 | d 22, d 42, | co-trans. | HSD17B4/ | 1876 or |
| | 8.3 μg | R9091, | LumSynt-Linker- | | d 70 | cap/A100 | PSMB3 | 1212, |
| | | R9092 | P2-Linker- | | | | | 1924, |
| | | | VP8*(41-223) | | | | | 1923 |
| | | | P[8], P[6], | | | | | |
| | | | P[4] | | | | | |
| 16 | 3 × | R8578, | Trivalent | d 0, d 21, | d 1, d 21, | co-trans. | HSD17B4/ | 1876 or |
| | 8.3 μg | R9091, | LumSynt-Linker- | d 42 | d 42, d 70 | cap/A100 | PSMB3 | 1212, |
| | | R9092 | P2-Linker- | | | | | 1924, |
| | | | VP8*(41-223) | | | | | 1923 |
| | | | P[8], P[6], | | | | | |
| | | | P[4] | | | | | |

[1011] 9.1. Determination of Specific Humoral Immune Responses by ELISA:

[1012] ELISA are performed using recombinant Rotavirus protein P2-VP8* P[8], P[6] or P[4] for coating. Coated plates are incubated using respective serum dilutions, and binding of specific antibodies to the recombinant Rotavirus protein P2-VP8* is detected using biotinylated isotype specific anti-guinea pig antibodies followed by streptavidin-HRP (horse radish peroxidase) with Amplex as substrate. Endpoint titers of antibodies (IgG) directed against the recombinant Rotavirus protein P2-VP8* P[8], P[6] or P[4] are measured by ELISA on day 21, 42, and 70 post prime immunization for groups 1, 2, 4-7, 9-12, 14 and 16 and on day 21 and 49 post prime immunization for groups 3, 8, 13, 15.

[1013] 9.2 Determination of Virus-Neutralizing Antibody Titers (VNTs) Against Rotavirus

[1014] Serum samples are collected on day 70 post prime for groups 1, 2, 4-7, 9-12, 14 and 16 and on day 49 post prime for groups 3, 8, 13, 15 as described in Example 5 and Rotavirus neutralization titers are measured as described below.

[1015] Diluted serum samples are incubated with a constant amount of Rotavirus virus strain Wa (G1P[8]), 1076 (G2P[6]), or DS-1 (G2P[4]) for 1 hour at 37° C., before transfer to a 96 well plate containing confluent MA104 cells. After 1 hour the monolayers are washed and incubated with the serum-virus mixture for 15-17 hours, frozen and thawed. VNTs are determined by measuring Rotavirus virus antigen in the lysed monolayers in wells receiving serum compared to viral control wells, using a standard enzyme-linked immunosorbent format. The neutralization titer represents a 60% reduction in the amount of virus.

1. A coding RNA for a Rotavirus vaccine comprising
a) at least one heterologous 5′ untranslated region (5′-UTR) and/or at least one heterologous 3′ untranslated region (3′-UTR); and
b) at least one coding sequence operably linked to said 3′-UTR and/or 5′-UTR encoding at least one antigenic protein of a Rotavirus, wherein said antigenic protein is or is derived from VP8* or an immunogenic fragment or immunogenic variant thereof.

2. Coding RNA of claim 1, wherein the Rotavirus is selected from species A, B or C, preferably wherein the Rotavirus is Rotavirus A.

3. Coding RNA of claim 1 or 2, wherein the Rotavirus is selected from the G-serotypes or P-serotypes G1, G2, G3, G4, G9, G12, P[4], P[6] or P[8].

4. Coding RNA of any one of the preceding claims, wherein the Rotavirus is a Rotavirus A selected from the P-serotypes P[4], P[6] or P[8].

5. Coding RNA of any one of the preceding claims, wherein the Rotavirus is a Rotavirus A selected from Human rotavirus A BE1058 (RVA/Human-wt/BEL/BE1058/2008/G2P[4], G2P[4], JN849123.1, GI:371455744, AEX30665.1, acronym: RVA/BE1058/P[4]), Human rotavirus A F01322 (Hu/BEL/F01322/2009/G3P[6], G3P[6], JF460826.1, GI: 37531451, AFA51886.1, acronym: RVA/F01322/P[6]), Human rotavirus A BE1128 (RVA/Human-wt/BEL/BE1128/2009/G1P[8], G1P[8], JN849135.1. GI: 371455756, AEX30671, acronym: RVA/BE1128/P[8]), or Human rotavirus A WA-VirWa (Wa variant VirWa, G1P[8], ACR22783.1, GI: 237846292, FJ423116, acronym: RVA/Wa-VirWa/P[8]).

6. Coding RNA of any one of the preceding claims, wherein the VP8* is a full length VP8* protein having an amino acid sequence comprising or consisting of amino acid 1 to amino acid 240, or a fragment of a VP8* protein.

7. Coding RNA of any one of claim 6, wherein the fragment of a VP8* comprises the lectin domain and lacks the N-terminal alpha helix-domain.

8. Coding RNA of any one of the preceding claims, wherein the amino acid sequences of the at least one antigenic protein derived from VP8* is mutated to delete at least one predicted or potential glycosylation site.

9. Coding RNA of any one of the preceding claims, wherein the amino acid sequences of the at least one antigenic protein derived from VP8* is mutated to delete all predicted or potential glycosylation sites.

10. Coding RNA of any one of the preceding claims, wherein the at least one coding sequence encodes at least one of the amino acid sequences being identical or at least 70%, 80%, 85%, 86%, 87%, 88%, 89%, 90%, 91%, 92%, 93%, 94%, 95%, 96%, 97%, 98%, or 99% identical to any one of SEQ ID NOs: 19-45, or an immunogenic fragment or immunogenic variant of any of these.

11. Coding RNA of any one of the preceding claims, wherein the at least one coding sequence additionally encodes one or more heterologous peptide or protein elements selected from a signal peptide, a linker, a helper epitope, an antigen clustering domain, or a transmembrane domain.

12. Coding RNA of claim 11, wherein the signal peptide is or is derived from HsPLAT, HsALB, IgE, wherein the amino acid sequences of said heterologous signal peptides is identical or at least 70%, 80%, 85%, 86%, 87%, 88%, 89%, 90%, 91%, 92%, 93%, 94%, 95%, 96%, 97%, 98%, or 99% identical to any one of amino acid sequences SEQ ID NOs: 1738-1740, or fragment or variant of any of these.

13. Coding RNA of claim 11, wherein the helper epitope is or is derived from P2, wherein the amino acid sequences of said helper epitopes is identical or at least 70%, 80%, 85%, 86%, 87%, 88%, 89%, 90%, 91%, 92%, 93%, 94%, 95%, 96%, 97%, 98%, or 99% identical to amino acid sequence SEQ ID NOs: 1750, or fragment or variant thereof.

14. Coding RNA of claim 11, wherein the antigen clustering domain is or is derived from ferritin or lumazine-synthase, wherein the amino acid sequences of said antigen clustering domain is identical or at least 70%, 80%, 85%, 86%, 87%, 88%, 89%, 90%, 91%, 92%, 93%, 94%, 95%, 96%, 97%, 98%, or 99% identical to any one of amino acid sequences SEQ ID NOs1759, 1764, or fragment or variant of any of these.

15. Coding RNA of claim 11, wherein the transmembrane domain is or is derived from an influenza HA transmembrane domain, preferably derived from an influenza A HA H1N1, more preferably from H1N1/A/Netherlands/602/2009, TM domain_HA, aa521-566, NCBI Acc. No.: ACQ45338.1, CY039527.1), or fragment or variant thereof.

16. Coding RNA of any one of the preceding claims, wherein the at least one coding sequence encodes the following elements preferably in N-terminal to C-terminal direction:
a) helper epitope, VP8*protein or VP8*fragment; or
b) helper epitope, VP8*protein or VP8*fragment; antigen clustering domain; or
c) Signal peptide, helper epitope, VP8*protein or fragment thereof; or
d) Signal peptide, helper epitope, VP8*protein or VP8*fragment, antigen clustering domain; or
e) Signal peptide, helper epitope, VP8*protein or VP8*fragment, transmembrane domain; or
f) antigen clustering domain, helper epitope; VP8*protein or VP8*fragment.

17. Coding RNA of any one of the preceding claims, wherein the at least one coding sequence encodes at least one of the amino acid sequences being identical or at least 70%, 80%, 85%, 86%, 87%, 88%, 89%, 90%, 91%, 92%, 93%, 94%, 95%, 96%, 97%, 98%, or 99% identical to any one of SEQ ID NOs: 1-6, 46-117, 1899, 1900, or an immunogenic fragment or immunogenic variant of any of these.

18. Coding RNA of claim 17, wherein the at least one coding sequence encodes at least one of the amino acid sequences being identical or at least 70%, 80%, 85%, 86%, 87%, 88%, 89%, 90%, 91%, 92%, 93%, 94%, 95%, 96%, 97%, 98%, or 99% identical to any one of SEQ ID NOs: 1-3, 4-6, 46-54, 64-72, 91-99, 109-117, or an immunogenic fragment or immunogenic variant of any of these.

19. Coding RNA of any one of the preceding claims, wherein the at least one coding sequence comprises a codon modified coding sequence comprising or consisting of a nucleic acid sequence being identical or at least 70%, 80%, 85%, 86%, 87%, 88%, 89%, 90%, 91%, 92%, 93%, 94%, 95%, 96%, 97%, 98%, or 99% identical to any one SEQ ID NOs: 190-261, 298-369, 406-477, 514-585, 1901-1906, or a fragment or variant of any of these sequences.

20. Coding RNA of any one of the preceding claims, wherein the at least one coding sequence comprises at least one modified nucleotide selected from pseudouridine (LP) and N1-methylpseudouridine (ml P), preferably wherein all uracil nucleotides are replaced by pseudouridine (V) nucleotides and/or N1-methylpseudouridine (ml 4) nucleotides.

21. Coding RNA of any one of the preceding claims, wherein the at least one coding sequence is a codon modified coding sequence, wherein the amino acid sequence encoded by the at least one codon modified coding sequence is preferably not being modified compared to the amino acid sequence encoded by the corresponding wild type coding sequence.

22. Coding RNA according to claim 21, wherein the at least one codon modified coding sequence is selected from C maximized coding sequence, CAI maximized coding sequence, human codon usage adapted coding sequence, G/C content modified coding sequence, and G/C optimized coding sequence, or any combination thereof.

23. Coding RNA of claim 21 or 22, wherein the at least one coding sequence comprises or consists of a codon modified coding sequence comprising or consisting of a nucleic acid sequence being identical or at least 70%, 80%, 85%, 86%, 87%, 88%, 89%, 90%, 91%, 92%, 93%, 94%, 95%, 96%, 97%, 98%, or 99% identical to any one SEQ ID NOs: 154-585, 1901-1906 or a fragment or variant of any of these sequences.

24. Coding RNA of any one of claims 21 to 23, wherein the at least one coding sequence comprises or consists of a codon modified coding sequence comprising or consisting of a nucleic acid sequence being identical or at least 70%, 80%, 85%, 86%, 87%, 88%, 89%, 90%, 91%, 92%, 93%, 94%, 95%, 96%, 97%, 98%, or 99% identical to any one of SEQ ID NOs: 190-198, 208-216, 235-243, 253-261, 298-306, 316-324, 343-351, 361-369, 1901-1906 or a fragment or variant of any of these sequences.

25. Coding RNA of any one of the preceding claims, wherein the coding RNA is an mRNA, a self-replicating RNA, a circular RNA, a viral RNA, or a replicon RNA.

26. Coding RNA of any one of the preceding claims, wherein the coding RNA is an mRNA.

27. Coding RNA of any one of the preceding claims, wherein the coding RNA comprises a 5′-cap structure, preferably cap0, cap1, cap2, a modified cap0 or a modified cap1 structure.

28. Coding RNA of claim 27, wherein the a 5′-cap structure is a cap1 structure,

29. Coding RNA of any one of the preceding claims, wherein the coding RNA comprises a cap1 structure, wherein said cap1 structure is obtainable by co-transcriptional capping preferably using a trinucleotide cap1 analogue.

30. Coding RNA of any one of claim 27 to 29, wherein about 70%, 75%, 80%, 85%, 90%, 95% of the coding RNA (species) comprises a cap1 structure as determined using a capping assay.

31. Coding RNA of any one of the preceding claims, wherein the coding RNA comprises at least one poly(A) sequence comprising about 30 to about 200 adenosine nucleotides, preferably comprising about 100 adenosine nucleotides.

32. Coding RNA of claim 31, wherein the at least one poly(A) sequence is located at the 3′ terminus, preferably wherein the 3′ terminal nucleotide of the coding RNA is the 3′ terminal A nucleotide of the poly(A) sequence.

33. Coding RNA of any one of the preceding claims, wherein the coding RNA comprises a cap1 structure as defined in claims 27 to 30 and at least one poly(A) sequence as defined in claims 31 to 32.

34. Coding RNA of any one of the preceding claims, wherein the RNA comprises at least one histone stem-loop, wherein the histone stem-loop preferably comprises or consists of a nucleic acid sequence identical or at least 70%, 80%, 90%, 91%, 92%, 93%, 94%, 95%, 96%, 97%, 98%, or 99% identical to SEQ ID NOs: 1819 or 1820, or fragments or variants thereof.

35. Coding RNA of any one of the preceding claims, wherein the RNA comprises at least one 3′ terminal sequence element comprising or consisting of a nucleic acid sequence being identical or at least 70%, 80%, 90%, 91%, 92%, 93%, 94%, 95%, 96%, 97%, 98%, or 99% identical to SEQ ID NOs: 1825-1856, or a fragment or variant thereof.

36. Coding RNA of any one of the preceding claims, wherein the at least one heterologous 3′-UTR comprises or consisting of a nucleic acid sequence derived from a 3′-UTR of a gene selected from PSMB3, ALB7, alpha-globin, CASP1, COX6B1, GNAS, NDUFA1 and RPS9, or from a homolog, a fragment or a variant of any one of these genes.

37. Coding RNA of any one of the preceding claims, wherein the at least one heterologous 5′-UTR comprises or consisting of a nucleic acid sequence derived from a 5′-UTR of a gene selected from HSD17B4, RPL32, ASAH1, ATP5A1, MP68, NDUFA4, NOSIP, RPL31, SLC7A3, TUBB4B and UBQLN2, or from a homolog, a fragment or variant of any one of these genes.

38. Coding RNA of any one of the preceding claims, wherein
the at least one heterologous 5′-UTR is derived from a 5′-UTR of a HSD17B4 gene, or from a corresponding RNA sequence, homolog, fragment or variant thereof and the at least one 3-UTR is derived from a 3′-UTR of a PSMB3 gene, or from a corresponding RNA sequence, homolog, fragment or variant thereof, preferably wherein said 5′-UTR comprises or consists of a nucleic acid sequence being identical or at least 70%, 80%, 85%, 86%, 87%, 88%, 89%, 90%, 91%, 92%, 93%, 94%, 95%, 96%, 97%, 98%, or 99% identical to SEQ ID NOs: 1781 or 1782 or a fragment or a variant thereof, and wherein said 3′-UTR comprises or consists of a nucleic acid sequence being identical or at least 70%, 80%, 85%, 86%, 87%, 88%, 89%, 90%, 91%, 92%, 93%, 94%, 95%, 96%, 97%, 98%, or 99% identical to SEQ ID NOs:
1803 or 1804 or a fragment or a variant thereof; or
the at least one heterologous 3′-UTR is derived from a 3′-UTR of a alpha-globin gene gene, or from a corresponding RNA sequence, homolog, fragment or variant thereof, preferably wherein said 3′-UTR comprises or consists of a nucleic acid sequence being identical or at least 70%, 80%, 85%, 86%, 87%, 88%, 89%, 90%, 91%, 92%, 93%, 94%, 95%, 96%, 97%, 98%, or 99% identical to SEQ ID NOs: 1817 or 1818 or a fragment or a variant thereof.

39. Coding RNA of any one of the preceding claims, wherein the coding RNA comprises or consists of an RNA sequence which is identical or at least 70%, 80%, 85%, 86%, 87%, 88%, 89%, 90%, 91%, 92%, 93%, 94%, 95%, 96%, 97%, 98%, or 99% identical to a nucleic acid sequence selected from the group consisting of SEQ ID NOs: 586-1737, 1862-1882, 1885-1898, 1907-1930 or a fragment or variant of any of these sequences.

40. Coding RNA of claim 39, wherein the coding RNA comprises or consists of an RNA sequence which is identical or at least 70%, 80%, 85%, 86%, 87%, 88%, 89%, 90%, 91%, 92%, 93%, 94%, 95%, 96%, 97%, 98%, or 99% identical to a nucleic acid sequence selected from the group consisting of SEQ ID NOs: 586-594, 604-612, 631-639, 649-666, 676-684, 703-711, 721-738, 748-756, 775-783, 793-810, 820-828, 847-855, 865-882, 892-900, 919-927, 937-954, 964-972, 991-999, 1009-1026, 1036-1044, 1063-1071, 1081-1098, 1108-1116, 1135-1143, 1153-1170, 1180-1188, 1207-1215, 1225-1242, 1252-1260, 1279-1287, 1297-1314, 1324-1332, 1351-1359, 1369-1386, 1396-1404, 1423-1431, 1441-1458, 1468-1476, 1495-1503, 1513-1530, 1540-1548, 1567-1575, 1585-1602, 1612-1620, 1639-1647, 1657-1674, 1684-1692, 1711-1719, 1729-1737, 1862-1870, 1872-1877, 1885, 1898, 1907-1930 or a fragment or variant of any of these sequences.

41. A composition comprising at least one coding RNA as defined in any one of claims 1 to 40, wherein the composition optionally comprises at least one pharmaceutically acceptable carrier or excipient.

42. Composition of claim 41, wherein the composition comprises more than one or a plurality, preferably 2, 3, 4, 5, 6, 7, 8, 9, or 10 different coding RNAs each defined in any one of claims 1 to 40.

43. Composition of claim 42, wherein the composition comprises
(i) at least one coding RNA encoding at least one antigenic protein that is or is derived from VP8* of a Rotavirus A from a P[4] serotype, preferably according to SEQ ID Nos: 586-588, 595-597, 604-606, 613-615, 622-624, 631-633, 640-642, 649-651, 658-660, 667-669, 676-678, 685-687, 694-696, 703-705, 712-714, 721-723, 730-732, 739-741, 748-750, 757-759, 766-768, 775-777, 784-786, 793-795, 802-804, 811-813, 820-822, 829-831, 838-840, 847-849, 856-858, 865-867, 874-876, 883-885, 892-894, 901-903, 910-912, 919-921, 928-930, 937-939, 946-948, 955-957, 964-966, 973-975, 982-984, 991-993, 1000-1002, 1009-1011, 1018-1020, 1027-1029, 1036-1038, 1045-1047, 1054-1056, 1063-1065, 1072-1074, 1081-1083, 1090-1092, 1099-1101, 1108-1110, 1117-1119, 1126-1128, 1135-1137, 1144-1146, 1153-1155, 1162-1164, 1171-1173, 1180-1182, 1189-1191, 1198-1200, 1207-1209, 1216-1218, 1225-1227, 1234-1236, 1243-1245, 1252-1254, 1261-1263, 1270-1272, 1279-1281, 1288-1290, 1297-1299, 1306-1308, 1315-1317, 1324-1326, 1333-1335, 1342-1344, 1351-1353, 1360-1362, 1369-1371, 1378-1380, 1387-1389, 1396-1398, 1405-1407, 1414-1416, 1423-1425, 1432-1434, 1441-1443, 1450-1452, 1459-1461, 1468-1470, 1477-1479, 1486-1488, 1495-1497, 1504-1506, 1513-1515, 1522-1524, 1531-1533, 1540-1542, 1549-1551, 1558-1560, 1567-1569, 1576-1578, 1585-1587, 1594-1596, 1603-1605, 1612-1614, 1621-1623, 1630-1632, 1639-1641, 1648-1650, 1657-1659, 1666-1668, 1675-1677, 1684-1686, 1693-1695, 1702-1704, 1711-1713, 1720-1722, 1729-1731, 1886, 1907, 1909, 1911, 1913, 1915, 1917, 1919, 1921, 1923, 1925, 1927, 1929 or fragments or variants thereof; and
(ii) at least one coding RNA encoding at least one antigenic protein that is or is derived from VP8* of a Rotavirus A from a P[6] serotype, preferably according to SEQ ID Nos: 589, 590, 598, 599, 607, 608, 616, 617, 625, 626, 634, 635, 643, 644, 652, 653, 661, 662, 670, 671, 679, 680, 688, 689, 697, 698, 706, 707, 715, 716, 724, 725, 733, 734, 742, 743, 751, 752, 760, 761, 769, 770, 778, 779, 787, 788, 796, 797, 805, 806, 814, 815, 823, 824, 832, 833, 841, 842, 850, 851, 859, 860, 868, 869, 877, 878, 886, 887, 895, 896, 904, 905, 913, 914, 922, 923, 931, 932, 940, 941, 949, 950, 958, 959, 967, 968, 976, 977, 985, 986, 994, 995, 1003, 1004, 1012, 1013, 1021, 1022, 1030, 1031, 1039, 1040, 1048, 1049, 1057, 1058, 1066, 1067, 1075, 1076, 1084, 1085, 1093, 1094, 1102, 1103, 1111, 1112, 1120, 1121, 1129, 1130, 1138, 1139, 1147, 1148, 1156, 1157, 1165, 1166, 1174, 1175, 1183, 1184, 1192, 1193, 1201, 1202, 1210, 1211, 1219, 1220, 1228, 1229, 1237, 1238, 1246, 1247, 1255, 1256, 1264, 1265, 1273, 1274, 1282, 1283, 1291, 1292, 1300, 1301, 1309, 1310, 1318, 1319, 1327, 1328, 1336, 1337, 1345, 1346, 1354, 1355, 1363, 1364, 1372, 1373, 1381, 1382, 1390, 1391, 1399, 1400, 1408, 1409, 1417, 1418, 1426, 1427, 1435, 1436, 1444, 1445, 1453, 1454, 1462, 1463, 1471, 1472, 1480, 1481, 1489, 1490, 1498, 1499, 1507, 1508, 1516, 1517, 1525, 1526, 1534, 1535, 1543, 1544, 1552, 1553, 1561, 1562, 1570, 1571, 1579, 1580, 1588, 1589, 1597, 1598, 1606, 1607, 1615, 1616, 1624, 1625, 1633, 1634, 1642, 1643, 1651, 1652, 1660, 1661, 1669, 1670, 1678, 1679, 1687, 1688, 1696, 1697, 1705, 1706, 1714, 1715, 1723, 1724, 1732, 1733, 1887, 1890, 1895-1897, 1908, 1910, 1912, 1914, 1916, 1918, 1920, 1922, 1924, 1926, 1928, 1930 or fragments or variants thereof; and
(iii) at least one coding RNA encoding at least one antigenic protein that is or is derived from VP8* of a Rotavirus A from a P[8] serotype, preferably according to SEQ ID Nos: 591-594, 600-603, 609-612, 618-621, 627-630, 636-639, 645-648, 654-657, 663-666, 672-675, 681-684, 690-693, 699-702, 708-711, 717-720, 726-729, 735-738, 744-747, 753-756, 762-765, 771-774, 780-783, 789-792, 798-801, 807-810, 816-819, 825-828, 834-837, 843-846, 852-855, 861-864, 870-873, 879-882, 888-891, 897-900, 906-909, 915-918, 924-927, 933-936, 942-945, 951-954, 960-963, 969-972, 978-981, 987-990, 996-999, 1005-1008, 1014-1017, 1023-1026, 1032-1035, 1041-1044, 1050-1053, 1059-1062, 1068-1071, 1077-1080, 1086-1089, 1095-1098, 1104-1107, 1113-1116, 1122-1125, 1131-1134, 1140-1143, 1149-1152, 1158-1161, 1167-1170, 1176-1179, 1185-1188, 1194-1197, 1203-1206, 1212-1215, 1221-1224, 1230-1233, 1239-1242, 1248-1251, 1257-1260, 1266-1269, 1275-1278, 1284-1287, 1293-1296, 1302-1305, 1311-1314, 1320-1323, 1329-1332, 1338-1341, 1347-1350, 1356-1359, 1365-1368, 1374-1377, 1383-1386, 1392-1395, 1401-1404, 1410-1413, 1419-1422, 1428-1431, 1437-1440, 1446-1449, 1455-1458, 1464-1467, 1473-1476, 1482-1485, 1491-1494, 1500-1503, 1509-1512, 1518-1521, 1527-1530, 1536-1539, 1545-1548, 1554-1557, 1563-1566, 1572-1575, 1581-1584, 1590-1593, 1599-1602, 1608-1611, 1617-1620, 1626-1629, 1635-1638, 1644-1647, 1653-1656, 1662-1665, 1671-1674, 1680-1683, 1689-1692, 1698-1701, 1707-1710, 1716-1719, 1725-1728, 1734-1737, 1862-1882, 1885, 1888, 1889, 1891-1894, 1898 or fragments or variants thereof,
wherein preferably the at least one antigenic protein comprises a heterologous element selected from a signal peptide, a linker, a helper epitope, an antigen clustering domain, or a transmembrane domain.

44. Composition of any one of claims 41 to 43, wherein the at least one coding RNA or the plurality of coding RNAs is complexed or associated with or at least partially complexed or partially associated with one or more cationic or polycationic compound, preferably cationic or polycationic polymer, cationic or polycationic polysaccharide, cationic or polycationic lipid, cationic or polycationic protein, cationic or polycationic peptide, or any combinations thereof.

45. Composition of claim 44, wherein the at least one coding RNA or the plurality of coding RNAs is complexed, encapsulated, partially encapsulated, or associated with one or more lipids, thereby forming liposomes, lipid nanoparticles, lipoplexes, and/or nanoliposomes.

46. Composition of claim 45, wherein the at least one coding RNA or the plurality of coding RNAs is complexed with one or more lipids thereby forming lipid nanoparticles (LNP).

47. Composition of claim 46, wherein the LNP comprises a cationic lipid according to formula III-3:

[chemical structure]

48. Composition of any one of claims 46 to 47, wherein the LNP comprises a PEG lipid, wherein the PEG-lipid is of formula (IVa): [chemical structure]
wherein n has a mean value ranging from 30 to 60, preferably wherein n has a mean value of about 45, 46, 47, 48, 49, 50, 51, 52, 53, 54, most preferably wherein n has a mean value of 49.

49. Composition of any one of claims 46 to 48, wherein the LNP comprises one or more neutral lipids and/or one or more steroid or steroid analogues.

50. Composition of claim 49, wherein the neutral lipid is 1,2-distearoyl-sn-glycero-3-phosphocholine (DSPC), preferably wherein the molar ratio of the cationic lipid to DSPC is in the range from about 2:1 to about 8:1.

51. Composition of claim 49, wherein the steroid is cholesterol, preferably wherein the molar ratio of the cationic lipid to cholesterol is in the range from about 2:1 to about 1:1

52. Composition of any one of claims 44 to 49, wherein the LNP comprises or consisting of
(i) at least one cationic lipid, preferably as defined in claim 47;
(ii) a neutral lipid, preferably as defined in claim 50;
(iii) a steroid or steroid analogue, preferably as defined in claim 51; and
(iv) a PEG-lipid, e.g. PEG-DMG or PEG-cDMA, preferably as defined in claim 48.

53. Composition according to any one of claim 52, wherein (i) to (iv) are in a molar ratio of about 20-60% cationic lipid, 5-25% neutral lipid, 25-55% sterol, and 0.5-15% PEG-lipid.

54. Composition of claim 46, wherein the LNP comprises COATSOME® SS-EC.

55. Composition of any one of claims 46 and 54, wherein the LNP comprises a PEG lipid, wherein the PEG-lipid is DMG-PEG 2000.

56. Composition of any one of claims 46 and 54 to 55, wherein the LNP further comprises 1,2-diphytanoyl-sn-glycero-3-phosphoethanolamine (DPhyPE) and cholesterol.

57. Composition of claims 46 to 56, wherein the LNPs are preferably selected from GN01-LNP or LNP-III-3.

58. A vaccine comprising at least one coding RNA as defined in any one of claims 1 to 40, or the composition as defined in any one of claims 41 to 57.

59. Vaccine of claim 58, wherein the vaccine elicits an adaptive immune response.

60. Vaccine of claims 58 to 59, wherein the vaccine is a polyvalent vaccine, preferably a trivalent vaccine.

61. A Kit or kit of parts, comprising at least one coding RNA as defined in any one of claims 1 to 40, at least one composition as defined in any one of claims 41 to 57, and/or at least one vaccine as defined in any one of claims 58 to 60, optionally comprising a liquid vehicle for solubilising, and, optionally, technical instructions providing information on administration and dosage of the components.

62. Coding RNA as defined in any one of claims 1 to 40, the composition as defined in any one of claims 41 to 57, the vaccine as defined in any one of claims 58 to 60, or the kit or kit of parts as defined in claim 57, for use as a medicament.

63. Coding RNA as defined in any one of claims 1 to 40, the composition as defined in any one of claims 41 to 53, the vaccine as defined in any one of claims 54 to 56, or the kit or kit of parts as defined in claim 61, for use in the treatment or prophylaxis of a Rotavirus infection, or of a disorder related to such an infection.

64. Use according to claim 63, wherein the Rotavirus infection is a Rotavirus A infection, in particular a Rotavirus A infection of serotypes [P4], [P6], and/or [P8].

65. A method of treating or preventing a disorder, wherein the method comprises applying or administering to a subject in need thereof at least one coding RNA as defined in any one of claims 1 to 40, at least one composition as defined in any one of claims 41 to 57, at least one vaccine as defined in any one of claims 58 to 60, or at least one kit or kit of parts as defined in claim 61.

66. Method of claim 65 wherein the disorder is an infection with a Rotavirus, or a disorder related to such an infection, preferably a Rotavirus A, or a disorder related to such an infection.

67. Method of claims 65 to 66, wherein the subject in need is a mammalian subject, preferably a human subject.

68. Method of any one of claims 65 to 67, wherein applying or administering to a subject is performed using intramuscular administration, preferably intramuscular injection.

The application's sequence listing, which the Patent Office published only in electronic form, follows.

SEQUENCE LISTING (1930 sequences)

SEQ ID NO: 1 - protein, 372 aa, Artificial Sequence
  derived and/or modified protein sequence (artificial) from RVA/BE1128/P[8]__AEX30671.1__LumSynt_P2_VP8*(41-223)
MQIYEGKLTAEGLRFGIVASRFNHALVDRLVEGAIDAIVRHGGREEDITLVRVPGSWEIPVAAGELARKEDIDAVIAIGVLIRGATPHFDYIASEVSKGLADLSLELRKPITFGVITADTLEQAIERAGTKHGNKGWEAALSAIEMANLFKSLRGGSGGSGGSGGSGGGQYIKANSKFIGITELGSGSGAQTRYAPVNWGHGEINDSTTVEPILDGPYQPTTFTPPTDYWILITSNTNGVVYESTNNSDFWTAVIAVEPHVNPVDRQYNVFGENKQFNVRNDSDKWKFLEMFRGSSQNDFYNRRTLTSDTRLVGILKYGGRVWTFHGETPRATTDSSNTANLDGISITIHSEFYIIPRSQESKCNEYINNGL

SEQ ID NO: 2 - protein, 372 aa, Artificial Sequence
  derived and/or modified protein sequence (artificial) from RVA/F01322/P[6]__AFA51886.1__LumSynt_P2_VP8*(41-223)
MQIYEGKLTAEGLRFGIVASRFNHALVDRLVEGAIDAIVRHGGREEDITLVRVPGSWEIPVAAGELARKEDIDAVIAIGVLIRGATPHFDYIASEVSKGLADLSLELRKPITFGVITADTLEQAIERAGTKHGNKGWEAALSAIEMANLFKSLRGGSGGSGGSGGSGGGQYIKANSKFIGITELGSGSGAQTNYAPVTWSHGEVNDSTTIEPVLDGPYQPTNFKPPNDYWILLNPTNQQVVLEGTNKTDIWVALLLVEPNVTNQSRQYTLFGETKQITVENNTNKWKFFEMFRSSVSAEFQHKRTLTSDTKLAGFMKFYNSVWTFHGETPNATTDYSSTSNLFEVETVIHVEFYIIPRSQESKCSEYINTGL

SEQ ID NO: 3 - protein, 372 aa, Artificial Sequence
  derived and/or modified protein sequence (artificial) from RVA/BE1058/P[4]__AEX30665.1__LumSynt_P2_VP8*(41-223)
MQIYEGKLTAEGLRFGIVASRFNHALVDRLVEGAIDAIVRHGGREEDITLVRVPGSWEIPVAAGELARKEDIDAVIAIGVLIRGATPHFDYIASEVSKGLADLSLELRKPITFGVITADTLEQAIERAGTKHGNKGWEAALSAIEMANLFKSLRGGSGGSGGSGGSGGGQYIKANSKFIGITELGSGSGAQTRYAPVNWGHGEINDSTTVEPVLDGPYQPTTFKPPNDYWLLISSNTDGVVYESTNNSDFWTAVIAVEPHVNQTNRQYVLFGENKQFNIENSSDKWKFFEMFKGNSQSDFSNRRTLTSSNRLVGMLKYGGRVWTFHGETPRATTDSSSTADLNNISIIIHSEFYIIPRSQESKCNEYINNGL

SEQ ID NO: 4 - protein, 180 aa, Artificial Sequence
  derived and/or modified protein sequence (artificial) from RVA/BE1128/P[8]__AEX30671.1__P2_VP8*(65-223)
MQYIKANSKFIGITELGSGSGLDGPYQPTTFTPPTDYWILITSNTNGVVYESTNNSDFWTAVIAVEPHVNPVDRQYNVFGENKQFNVRNDSDKWKFLEMFRGSSQNDFYNRRTLTSDTRLVGILKYGGRVWTFHGETPRATTDSSNTANLDGISITIHSEFYIIPRSQESKCNEYINNGL

SEQ ID NO: 5 - protein, 180 aa, Artificial Sequence
  derived and/or modified protein sequence (artificial) from RVA/F01322/P[6]__AFA51886.1__P2_VP8*(65-223)
MQYIKANSKFIGITELGSGSGLDGPYQPTNFKPPNDYWILLNPTNQQVVLEGTNKTDIWVALLLVEPNVTNQSRQYTLFGETKQITVENNTNKWKFFEMFRSSVSAEFQHKRTLTSDTKLAGFMKFYNSVWTFHGETPNATTDYSSTSNLFEVETVIHVEFYIIPRSQESKCSEYINTGL

SEQ ID NO: 6 - protein, 180 aa, Artificial Sequence
  derived and/or modified protein sequence (artificial) from RVA/BE1058/P[4]__AEX30665.1__P2_VP8*(65-223)
MQYIKANSKFIGITELGSGSGLDGPYQPTTFKPPNDYWLLISSNTDGVVYESTNNSDFWTAVIAVEPHVNQTNRQYVLFGENKQFNIENSSDKWKFFEMFKGNSQSDFSNRRTLTSSNRLVGMLKYGGRVWTFHGETPRATTDSSSTADLNNISIIIHSEFYIIPRSQESKCNEYINNGL

SEQ ID NO: 7 - protein, 240 aa, Artificial Sequence
  derived and/or modified protein sequence (wt) from RVA/BE1128/P[8]__AEX30671.1__VP8*
MASLIYRQLLTNSYSVDLHDEIEQIGSEKTQNVTVNPGPFAQTRYAPVNWGHGEINDSTTVEPILDGPYQPTTFTPPTDYWILITSNTNGVVYESTNNSDFWTAVIAVEPHVNPVDRQYNVFGENKQFNVRNDSDKWKFLEMFRGSSQNDFYNRRTLTSDTRLVGILKYGGRVWTFHGETPRATTDSSNTANLDGISITIHSEFYIIPRSQESKCNEYINNGLPPIQNTRNVVPLSLSSR

SEQ ID NO: 8 - protein, 240 aa, Artificial Sequence
  derived and/or modified protein sequence (wt) from RVA/F01322/P[6]__AFA51886.1__VP8*
MASLIYRQLLTNSYTVELSDEINTIGSEKNQNVTINPGPFAQTNYAPVTWSHGEVNDSTTIEPVLDGPYQPTNFKPPNDYWILLNPTNQQVVLEGTNKTDIWVALLLVEPNVTNQSRQYTLFGETKQITVENNTNKWKFFEMFRSSVSAEFQHKRTLTSDTKLAGFMKFYNSVWTFHGETPNATTDYSSTSNLFEVETVIHVEFYIIPRSQESKCSEYINTGLPPMQNTRNIVPVALSSR

SEQ ID NO: 9 - protein, 240 aa, Artificial Sequence
  derived and/or modified protein sequence (wt) from RVA/BE1058/P[4]__AEX30665.1__VP8*
MASLIYRQLLTNSYSVDLHDEIEQIGSEKTQNVTVNPGPFAQTRYAPVNWGHGEINDSTTVEPVLDGPYQPTTFKPPNDYWLLISSNTDGVVYESTNNSDFWTAVIAVEPHVNQTNRQYVLFGENKQFNIENSSDKWKFFEMFKGNSQSDFSNRRTLTSSNRLVGMLKYGGRVWTFHGETPRATTDSSSTADLNNISIIIHSEFYIIPRSQESKCNEYINNGLPPIQNTRNVVPLSLSSR

SEQ ID NO: 10 - protein, 775 aa, Artificial Sequence
  derived and/or modified protein sequence (wt) from RVA/BE1058/P[4]__AEX30665.1__VP4
MASLIYRQLLTNSYSVDLHDEIEQIGSEKTQNVTVNPGPFAQTRYAPVNWGHGEINDSTTVEPVLDGPYQPTTFKPPNDYWLLISSNTDGVVYESTNNSDFWTAVIAVEPHVNQTNRQYVLFGENKQFNIENSSDKWKFFEMFKGNSQSDFSNRRTLTSSNRLVGMLKYGGRVWTFHGETPRATTDSSSTADLNNISIIIHSEFYIIPRSQESKCNEYINNGLPPIQNTRNVVPLSLSSRSIQYRRAQVNEDITISKTSLWKEMQYNRDIIIRFKFGNSVIKLGGLGYKWSEISYKAANYQYSYSRDGEQVTAHTTCSVNGVNNFSYNGGSLPTDFSISRYEVIKENSYVYIDYWDDSKAFRNMVYVRSLAANLNSVKCAGGSYDFRLPVGEWPIMNGGAVSLHFAGVTLSTQFTDFVSLNSLRFRFSLTVDEPSFSIIRTRTMNLYGLPAANPNNGNEYYEVSGRFSLISLVPTNDDYQTPIMNSVTVRQDLERQLNDLREEFNSLSQEIAMSQLIDLALLPLDMFSMFSGIKSTIDLTKSMATSVMKKFRKSKLATSISEMTNSLSDAASSASRSASIRSNLSAISNWSDASKSVLNVTDSLNDVSTQTSTISKKLRLKEMITQTEGINFDDISAAVLKTKMDMSTQIGKNTLPDIVTEASEKFIPKRSYRVLKDDEVMEVNTEGKFFAYKVDTLNEIPFDINKFAELVTDSPVISAIIDFKTLKNLNDNYGITRIEALDLIKSNPNVLRNFINQNNPIIRNRIEQLILQCKL

SEQ ID NO: 11 - protein, 775 aa, Artificial Sequence
  derived and/or modified protein sequence (wt) from RVA/DS-1/P[4]__CAD62680.1__VP4
MASLIYRQLLTNSYSVDLHDEIEQIGSEKTQSVTVNPGPFAQTRYAPVNWGSWEINDSTTVEPVLDGPYQPTTFKPPNDYWLLISSNTNGVVYESTNNNDFWTAVSSVEPHVSQTNRQYILFGENKQFNVENNSDKWKFFETFTGSSQGNFSNRRTLTSSNRLVGMLKYGGRVWTFHGETPRATTDSSNTADLNNISIIIHSEFYIIPRSQESKCNEYINNGLPPIQNTRNVVPLSLSSRSIQYKRAQVNEDITISKTSLWKEMQYNRDIIIRFKFGNSIIKLGGLGYKWSEISYKAANYQYSYSRDGEQVTAHTTCSVNGVNNFSYNGGSLPTDFSISRYEVIKENSYVYIDYWDDSKAFRNMVYVRSLAANLNSVKCTGGSYNFRLPVGKWPIMDGGAVSLHFAGVTLSTQFTDFVSLNSLRFRFSLTVDEPSFSIIRTRTINLYGLPAANPNNGNEYYEMSGRFSLISLVQTNDDYQTPIMNSVTVRQDLERQLNDLREEFNSLSQEIAMSQLIDLALLPLDMFSMFSGIKSTIDLTKSMATSVMKKFRKSKLATSISEMTNSLSDAASSASRSASIRSNLSTISNWTNTSKSVSNVTDSVNDVSTQTSTISKKLRLREMITQTEGLSFDDISAAVLKTKIDMSTQIGKNTLPDIVTEASEKFIPKRSYRVLKDDEVMEINTEGKFFAYKVDTLNEIPFDINKFAELVTDSPVISAIIDFKTLKNLNDNYGITRIEAFNLIKSNPNVLRNFINQNNPIIRNRIEQLILQCKL

SEQ ID NO: 12 - protein, 775 aa, Artificial Sequence
  derived and/or modified protein sequence (wt) from RVA/DS-1/P[4]__ABV53252.1__VP4
MASLIYRQLLTNSYSVDLHDEIEQIGSEKTQSVTVNPGPFAQTRYAPVNWGHGEINDSTTVEPVLDGPYQPTTFKPPNDYWLLISSNTNGVVYESTNNNDFWTAVIAVEPHVSQTNRQYILFGENKQFNVENNSDKWKFFEMFKGSSQGDFSNRRTLTSSNRLVGMLKYGGRVWTFHGETPRATTDSSNTADLNNISIIIHSEFYIIPRSQESKCNEYINNGLPPIQNTSNVVPLSLSSRSIQYRRAQVNEDITISKTSLWKEMQYNRDIIIRFKFGNSVIKLGGLGYKWSEISYKAANYQYSYSRDGEQVTAHTTCSVNGVNNFSYNGGSLPTDFSISRYEVIKENSYVYIDYWDDSKAFRNMVYVRSLAANLNSVKCIGGSYNFRLPVGKWPIMNGGAVSLHFAGVTLSTQFTDFVSLNSLRFRFSLTVDEPSFSIIRTRTINLYGLPAANPNNGNEYYEMSGRFSLISLVQTNDDYQTPIMNSVTVRQDLERQLNDLREEFNSLSQEIAMSQLIDLALLPLDMFSMFSGIKSTIDLTKSMATSVMKKFRKSKLATSISEMTNSLSDAASSASRSASIRSNLSTISNWTNTSKSVSNVTDSVNDVSTQTSTISKKLRLREMITQTEGLSFDDISAAVLKTKIDMSTQIGKNTLPDIVTEASEKFIPKRSYRVLKDDEVMEINTEGKFFAYKVDTLNEIPFDINKFAELVTDSPVISAIIDFKTLKNLNDNYGITRIEAFNLIKSNPNVLRNFINQNNPIIRNRIEQLILQCKL

SEQ ID NO: 13 - protein, 775 aa, Artificial Sequence
  derived and/or modified protein sequence (wt) from RVA/F01322/P[6]__AFA51886.1__VP4
MASLIYRQLLTNSYTVELSDEINTIGSEKNQNVTINPGPFAQTNYAPVTWSHGEVNDSTTIEPVLDGPYQPTNFKPPNDYWILLNPTNQQVVLEGTNKTDIWVALLLVEPNVTNQSRQYTLFGETKQITVENNTNKWKFFEMFRSSVSAEFQHKRTLTSDTKLAGFMKFYNSVWTFHGETPNATTDYSSTSNLFEVETVIHVEFYIIPRSQESKCSEYINTGLPPMQNTRNIVPVALSSRSVTYQRAQVNEDIIISKTSLWKEMQYNRDIIIRFKFNNSIVKLGGLGYKWSEISFKAANYQYNYLRDGEQVTAHTTCSVNGVNNFSYNGGSLPTDFSVSRYEVIKENSYVYVDYWDDSQAFRNMVYVRSLAANLNSVKCSGGNYNFQIPVGAWPVMSGGAVSLHFAGVTLSTQFTDFVSLNSLRFRFSLTVEEPPFSILRTRVSGLYGLPAFDPNNGHEYYEINGRFSLISLVPSNDDYQTPIMNSVTVRQDLERQLGDLREEFNSLSQEIAMTQLIDLALLPLDMFSMFSGIKSTIDAAKSMATKVMKKFKKSGLATSISELTGSLSNAASSVSRNSSIRSNISSISVWTDVSEQIAGTSDSVRNISTQTSAISKKLRLREITTQTEGMNFDDISAAVLKTKIDKSTHISPDTLPDIITESSEKFIPKRAYRVLKDDEVMEADVDGKFFAYKVDTFEEVPFDVDKFVDLVTDSPVISAIIDFKTLKNLNDNYGITRSQALDLIRSDPRVLRDFINQNNPIIKNRIEQLILQCRL

SEQ ID NO: 14 - protein, 775 aa, Artificial Sequence
  derived and/or modified protein sequence (wt) from RVA/1076/P[6]__AAA47337.1__VP4
MASLIYRQLLTNSYTVELSDEINTIGSEKSQNVTINPGPFAQTNYAPVTWSHGEVNDSTTIEPVLDGPYQPTSFKPPSDYWILLNPTNQQVVLEGTNKTDIWVALLLVEPNVTNQSRQYTLFGETKQITVENNTNKWKFFEMFRSSVSAEFQHKRTLTSDTKLAGFLKFYNSVWTFYGETPHATTDYSSTSNLSEVETAIHVEFYIIPRSQESKCNEYINTGLPPMQNTRNIVPVALSSRSVTYQRAQVNEDIIISKTSLWKEMQYNRDIIIRFKFNNSIVKLGGLGYKWPEISFKAANYQYNYLRDGEQVMAHTTCSVNGENNYSYNGGLLPTHFSVSRYEVIKENSYVYDNYWDDSQAFRNMVYVRSLAANLNSVKCSGGNYNFQMPVGAWPVMSGGAVSLHFAGVTLSTEFTDFVSLNSLRFRFSLTVEEPPFSILRTRVSGLYGLPAFNPNNGHEYYEIAGRFSFILLVPSNDDYQTPIMNSVTVRQDLERQLGDLREEFNSLSQEIAMTQLIDLALLPLDMFSMFSGIKSTIDAAKSMATMVMKKFKKSGLATSISELTRSLSNAASSVSRSSSIKSNISSISVWTDVSEQITGSSDSVRNISTQTSAISKRLRLREITTQTEGMNFIDISAAVLKTKIDKSTHISPDTLPDIITESSEKFLPKRAYRVLKDDEVMEVDVDGKFFAYKVDTFEEVPFDVDKFVDLVTDSPVISAIIDFKTLKNLNDNYGITRSQALDLIRSDPRVLRDFINQNNPIIKNRIEQLILQCRL

SEQ ID NO: 15 - protein, 775 aa, Artificial Sequence
  derived and/or modified protein sequence (wt) from RVA/BE1128/P[8]__AEX30671.1__VP4
MASLIYRQLLTNSYSVDLHDEIEQIGSEKTQNVTVNPGPFAQTRYAPVNWGHGEINDSTTVEPILDGPYQPTTFTPPTDYWILITSNTNGVVYESTNNSDFWTAVIAVEPHVNPVDRQYNVFGENKQFNVRNDSDKWKFLEMFRGSSQNDFYNRRTLTSDTRLVGILKYGGRVWTFHGETPRATTDSSNTANLDGISITIHSEFYIIPRSQESKCNEYINNGLPPIQNTRNVVPLSLSSRSIQYKRAQVNEDITISKTSLWKEMQYNRDIIIRFKFGNSIVKLGGLGYKWSEISYKAANYQYNYLRDGEQVTAHTTCSVNGVNNFSYNGGSLPTDFSVSRYEVIKENSYVYVDYWDDSKAFRNMVYVRSLAANLNSVKCTGGSYDFSIPVGAWPVMNGGAVSLHFAGVTLSTQFTDFVSLNSLRFRFSLTVDEPSFSILRTRTVNLYGLPAANPNNGNEYYEISGRFSLISLVPTNDDYQTPIMNSVTVRQDLERQLTDLREEFNSLSQEIAMSQLIDLALLPLDMFSMFSGIKSTIDLTKSMATSVMKKFRKSKLATSVSEMTNSLSDAASSASRSVSVRSNISAVSNWTNVSNDVSNVTNSVNDISTQTSTISKNLRLKEMITQTEGMSFDDISAAVLKTKIDMSTQIGKNTLPDIVTEASEKFIPKRSYRILKDDEVMEINTEGKFFAYKIDTLNEVPFDVNKFTELVTNSPVISAIIDFKTLKNLNDNYGITRTEALNLIKSNPNVLRNFINQNNPIIRNRIEQLILQCKL

SEQ ID NO: 16 - protein, 775 aa, Artificial Sequence
  derived and/or modified protein sequence (wt) from RVA/Wa-VirWa/P[8]__ACR22783.1__VP4
MASLIYRQLLTNSYSVDLHDEIEQIGSEKTQNVTINPSPFAQTRYAPVNWGHGEINDSTTVEPILDGPYQPTTFTPPNDYWILINSNTNGVVYESTNNSDFWTAVVAIEPHVNPVDRQYTIFGESKQFNVRNDSNKWKFLEMFRSSSQNEFYNRRTLTSDTRLVGILKYGGRVWTFHGETPRATTDSSSTANLNNISITIHSEFYIIPRSQESKCNEYINNGLPPIQNTRNVVPLPLSSRSIQYKRAQVNEDIIVSKTSLWKEMQYNRDIIIRFKFGNSIVKMGGLGYKWSEISYKAANYQYNYLRDGEQVTAHTTCSVNGVNNFSYNGGSLPTDFGISRYEVIKENSYVYVDYWDDSKAFRNMVYVRSLAANLNSVKCTGGSYDFSIPVGAWPVMNGGAVSLHFAGVTLSTQFTDFVSLNSLRFRFSLTVDEPPFSILRTRTVNLYGLPAANPNNGNEYYEISGRFSLISLVPTNDDYQTPIMNSVTVRQDLERQLTDLREEFNSLSQEIAMAQLIDLALLPLDMFSMFSGIKSTIDLTKSMATSVMKKFRKSKLATSISEMTNSLSDAASSASRNVSIRSNLSAISNWTNVSNDVSNVTNSLNDISTQTSTISKKLRLKEMITQTEGMSFDDISAAVLKTKIDMSTQIGKNTLPDIVTEASEKFIPKRSYRILKDDEVMEINTEGKFFAYKINTFDEVPFDVNKFAELVTDSPVISAIIDFKTLKNLNDNYGITRTEALNLIKSNPNMLRNFINQNNPIIRNRIEQLILQCKL

SEQ ID NO: 17 - protein, 775 aa, Artificial Sequence
  derived and/or modified protein sequence (wt) from RVA/Wa/P[8]__AAA47290.1__VP4
MASLIYRQLLTNSYSVDLHDEIEQIGSEKTQNVTINPSPFAQTRYAPVNWGHGEINDSTTVEPILDGPYQPTTFTPPNDYWILINSNTNGVVYESTNNSDFWTAVVAIEPHVNPVDRQYTIFGESKQFNVSNDSNKWKFLEMFRSSSQNEFYNRRTLTSDTRFVGILKYGGRVWTFHGETPRATTDSSSTANLNNISITIHSEFYIIPRSQESKCNEYINNGLPPIQNTRNVVPLPLSSRSIQYKRAQVNEDIIVSKTSLWKEMQYNRDIIIRFKFGNSIVKMGGLGYKWSEISYKAANYQYNYLRDGEQVTAHTTCSVNGVNNFSYNGGSLPTDFGISRYEVIKENSYVYVDYWDDSKAFRNMVYVRSLAANLNSVKCTGGSYNFSLPVGAWPVMNGGAVSLHFAGVTLSTQFTDFVSLNSLRFRFSLTVDEPPFSILRTRTVNLYGLPAANPNNGNEYYEISGRFSLIYLVPTNDDYQTPIMNSVTVRQDLERQLTDLREEFNSLSQEIAMAQLIDLALLPLGMFSMFSGIKSTIDLTKSMATSVMKKFRKSKLATSISEMTNSLSDAASSASRNVSIRSNLSAISNWTNVSNDVSNVTNSLNDISTQTSTISKKFRLKEMITQTEGMSFDDISAAVLKTKIDMSTQIGKNTLPDIVTEASEKFIPKRSYRILKDDEVMEINTEGKFFAYKINTFDEVPFDVNKFAELVTDSPVISAIIDFKTLKNLNDNYGITRTEALNLIKSNPNMLRNFINQNNPIIRNRIEQLILQCKL

SEQ ID NO: 18 - protein, 775 aa, Artificial Sequence
  derived and/or modified protein sequence (wt) from RVA/Wa/P[8]__AAA66953.1__VP4
MASLIYRQLLTNSYSVDLHDEIEQIGSEKTQNVTINPSPFAQTRYAPVNWGHGEINDSTTVEPMLDGPYQPTTFTPPNDYWILINSNTNGVVYESTNNSDFWTAVVAIEPHVNPVDRQYTIFGESKQFNVSNDSNKWKFLEMFRSSSQNEFYNRRTLTSDTRFVGILKYGGRVWTFHGETPRATTDSSSTANLNNISITIHSEFYIIPRSQESKCNEYINNGLPPIQNTRNVVPLPLSSRSIQYKRAQVNEDIIVSKTSLWKEMQYNRDIIIRFKFGNSIVKMGGLGYKWSEISYKAANYQYNYLRDGEQVTAHTTCSVNGVNNFSYNGGFLPTDFGISRYEVIKENSYVYVDYWDDSKAFRNMVYVRSLAANLNSVKCTGGSYNFSIPVGAWPVMNGGAVSLHFAGVTLSTQFTDFVSLNSLRFRFSLTVDEPPFSILRTRTVNLYGLPAANPNNGNEYYEISGRFSLIYLVPTNDDYQTPIMNSVTVRQDLERQLTDLREEFNSLSQEIAMAQLIDLALLPLDMFSMFSGIKSTIDLTKSMATSVMKKFRKSKLATSISEMTNSLSDAASSASRNVSIRSNLSAISNWTNVSNDVSNVTNSLNDISTQTSTISKKFRLKEMITQTEGMSFDDISAAVLKTKIDMSTQIGKNTLPDIVTEASEKFIPKRSYRILKDDEVMEINTEGKFFAYKINTFDEVPFDVNKFAELVTDSPVISAIIDFKTLKNLNDNYGITRTEALNLIKSNPNMLRNFINQNNPIIRNRIEQLILQCKL

SEQ ID NO: 19 - protein, 240 aa, Artificial Sequence; identical to SEQ ID NO: 9
  derived and/or modified protein sequence (wt) from RVA/BE1058/P[4]__AEX30665.1__VP8*

SEQ ID NO: 20 - protein, 240 aa, Artificial Sequence
  derived and/or modified protein sequence (wt) from RVA/DS-1/P[4]__CAD62680.1__VP8*
MASLIYRQLLTNSYSVDLHDEIEQIGSEKTQSVTVNPGPFAQTRYAPVNWGSWEINDSTTVEPVLDGPYQPTTFKPPNDYWLLISSNTNGVVYESTNNNDFWTAVSSVEPHVSQTNRQYILFGENKQFNVENNSDKWKFFETFTGSSQGNFSNRRTLTSSNRLVGMLKYGGRVWTFHGETPRATTDSSNTADLNNISIIIHSEFYIIPRSQESKCNEYINNGLPPIQNTRNVVPLSLSSR

SEQ ID NO: 21 - protein, 240 aa, Artificial Sequence
  derived and/or modified protein sequence (wt) from RVA/DS-1/P[4]__ABV53252.1__VP8*
MASLIYRQLLTNSYSVDLHDEIEQIGSEKTQSVTVNPGPFAQTRYAPVNWGHGEINDSTTVEPVLDGPYQPTTFKPPNDYWLLISSNTNGVVYESTNNNDFWTAVIAVEPHVSQTNRQYILFGENKQFNVENNSDKWKFFEMFKGSSQGDFSNRRTLTSSNRLVGMLKYGGRVWTFHGETPRATTDSSNTADLNNISIIIHSEFYIIPRSQESKCNEYINNGLPPIQNTSNVVPLSLSSR

SEQ ID NO: 22 - protein, 240 aa, Artificial Sequence; identical to SEQ ID NO: 8
  derived and/or modified protein sequence (wt) from RVA/F01322/P[6]__AFA51886.1__VP8*

SEQ ID NO: 23 - protein, 240 aa, Artificial Sequence
  derived and/or modified protein sequence (wt) from RVA/1076/P[6]__AAA47337.1__VP8*
MASLIYRQLLTNSYTVELSDEINTIGSEKSQNVTINPGPFAQTNYAPVTWSHGEVNDSTTIEPVLDGPYQPTSFKPPSDYWILLNPTNQQVVLEGTNKTDIWVALLLVEPNVTNQSRQYTLFGETKQITVENNTNKWKFFEMFRSSVSAEFQHKRTLTSDTKLAGFLKFYNSVWTFYGETPHATTDYSSTSNLSEVETAIHVEFYIIPRSQESKCNEYINTGLPPMQNTRNIVPVALSSR

SEQ ID NO: 24 - protein, 240 aa, Artificial Sequence; identical to SEQ ID NO: 7
  derived and/or modified protein sequence (wt) from RVA/BE1128/P[8]__AEX30671.1__VP8*

SEQ ID NO: 25 - protein, 240 aa, Artificial Sequence
  derived and/or modified protein sequence (wt) from RVA/Wa-VirWa/P[8]__ACR22783.1__VP8*
MASLIYRQLLTNSYSVDLHDEIEQIGSEKTQNVTINPSPFAQTRYAPVNWGHGEINDSTTVEPILDGPYQPTTFTPPNDYWILINSNTNGVVYESTNNSDFWTAVVAIEPHVNPVDRQYTIFGESKQFNVRNDSNKWKFLEMFRSSSQNEFYNRRTLTSDTRLVGILKYGGRVWTFHGETPRATTDSSSTANLNNISITIHSEFYIIPRSQESKCNEYINNGLPPIQNTRNVVPLPLSSR

SEQ ID NO: 26 - protein, 240 aa, Artificial Sequence
  derived and/or modified protein sequence (wt) from RVA/Wa/P[8]__AAA47290.1__VP8*
MASLIYRQLLTNSYSVDLHDEIEQIGSEKTQNVTINPSPFAQTRYAPVNWGHGEINDSTTVEPILDGPYQPTTFTPPNDYWILINSNTNGVVYESTNNSDFWTAVVAIEPHVNPVDRQYTIFGESKQFNVSNDSNKWKFLEMFRSSSQNEFYNRRTLTSDTRFVGILKYGGRVWTFHGETPRATTDSSSTANLNNISITIHSEFYIIPRSQESKCNEYINNGLPPIQNTRNVVPLPLSSR

SEQ ID NO: 27 - protein, 240 aa, Artificial Sequence
  derived and/or modified protein sequence (wt) from RVA/Wa/P[8]__AAA66953.1__VP8*
MASLIYRQLLTNSYSVDLHDEIEQIGSEKTQNVTINPSPFAQTRYAPVNWGHGEINDSTTVEPMLDGPYQPTTFTPPNDYWILINSNTNGVVYESTNNSDFWTAVVAIEPHVNPVDRQYTIFGESKQFNVSNDSNKWKFLEMFRSSSQNEFYNRRTLTSDTRFVGILKYGGRVWTFHGETPRATTDSSSTANLNNISITIHSEFYIIPRSQESKCNEYINNGLPPIQNTRNVVPLPLSSR

SEQ ID NO: 28 - protein, 159 aa, Artificial Sequence
  derived and/or modified protein sequence (wt) from RVA/BE1058/P[4]__AEX30665.1__VP8*(65-223)
LDGPYQPTTFKPPNDYWLLISSNTDGVVYESTNNSDFWTAVIAVEPHVNQTNRQYVLFGENKQFNIENSSDKWKFFEMFKGNSQSDFSNRRTLTSSNRLVGMLKYGGRVWTFHGETPRATTDSSSTADLNNISIIIHSEFYIIPRSQESKCNEYINNGL

SEQ ID NO: 29 - protein, 159 aa, Artificial Sequence
  derived and/or modified protein sequence (wt) from RVA/DS-1/P[4]__CAD62680.1__VP8*(65-223)
LDGPYQPTTFKPPNDYWLLISSNTNGVVYESTNNNDFWTAVSSVEPHVSQTNRQYILFGENKQFNVENNSDKWKFFETFTGSSQGNFSNRRTLTSSNRLVGMLKYGGRVWTFHGETPRATTDSSNTADLNNISIIIHSEFYIIPRSQESKCNEYINNGL

SEQ ID NO: 30 - protein, 159 aa, Artificial Sequence
  derived and/or modified protein sequence (wt) from RVA/DS-1/P[4]__ABV53252.1__VP8*(65-223)
LDGPYQPTTFKPPNDYWLLISSNTNGVVYESTNNNDFWTAVIAVEPHVSQTNRQYILFGENKQFNVENNSDKWKFFEMFKGSSQGDFSNRRTLTSSNRLVGMLKYGGRVWTFHGETPRATTDSSNTADLNNISIIIHSEFYIIPRSQESKCNEYINNGL

SEQ ID NO: 31 - protein, 159 aa, Artificial Sequence
  derived and/or modified protein sequence (wt) from RVA/F01322/P[6]__AFA51886.1__VP8*(65-223)
LDGPYQPTNFKPPNDYWILLNPTNQQVVLEGTNKTDIWVALLLVEPNVTNQSRQYTLFGETKQITVENNTNKWKFFEMFRSSVSAEFQHKRTLTSDTKLAGFMKFYNSVWTFHGETPNATTDYSSTSNLFEVETVIHVEFYIIPRSQESKCSEYINTGL

SEQ ID NO: 32 - protein, 159 aa, Artificial Sequence
  derived and/or modified protein sequence (wt) from RVA/1076/P[6]__AAA47337.1__VP8*(65-223)
LDGPYQPTSFKPPSDYWILLNPTNQQVVLEGTNKTDIWVALLLVEPNVTNQSRQYTLFGETKQITVENNTNKWKFFEMFRSSVSAEFQHKRTLTSDTKLAGFLKFYNSVWTFYGETPHATTDYSSTSNLSEVETAIHVEFYIIPRSQESKCNEYINTGL

SEQ ID NO: 33 - protein, 159 aa, Artificial Sequence
  derived and/or modified protein sequence (wt) from RVA/BE1128/P[8]__AEX30671.1__VP8*(65-223)
LDGPYQPTTFTPPTDYWILITSNTNGVVYESTNNSDFWTAVIAVEPHVNPVDRQYNVFGENKQFNVRNDSDKWKFLEMFRGSSQNDFYNRRTLTSDTRLVGILKYGGRVWTFHGETPRATTDSSNTANLDGISITIHSEFYIIPRSQESKCNEYINNGL

SEQ ID NO: 34 - protein, 159 aa, Artificial Sequence
  derived and/or modified protein sequence (wt) from RVA/Wa-VirWa/P[8]__ACR22783.1__VP8*(65-223)
LDGPYQPTTFTPPNDYWILINSNTNGVVYESTNNSDFWTAVVAIEPHVNPVDRQYTIFGESKQFNVRNDSNKWKFLEMFRSSSQNEFYNRRTLTSDTRLVGILKYGGRVWTFHGETPRATTDSSSTANLNNISITIHSEFYIIPRSQESKCNEYINNGL

SEQ ID NO: 35 - protein, 159 aa, Artificial Sequence
  derived and/or modified protein sequence (wt) from RVA/Wa/P[8]__AAA47290.1__VP8*(65-223)
LDGPYQPTTFTPPNDYWILINSNTNGVVYESTNNSDFWTAVVAIEPHVNPVDRQYTIFGESKQFNVSNDSNKWKFLEMFRSSSQNEFYNRRTLTSDTRFVGILKYGGRVWTFHGETPRATTDSSSTANLNNISITIHSEFYIIPRSQESKCNEYINNGL

SEQ ID NO: 36 - protein, 159 aa, Artificial Sequence; identical to SEQ ID NO: 35
  derived and/or modified protein sequence (wt) from RVA/Wa/P[8]__AAA66953.1__VP8*(65-223)

SEQ ID NO: 37 - protein, 183 aa, Artificial Sequence
  derived and/or modified protein sequence (wt) from RVA/BE1058/P[4]__AEX30665.1__VP8*(41-223)
AQTRYAPVNWGHGEINDSTTVEPVLDGPYQPTTFKPPNDYWLLISSNTDGVVYESTNNSDFWTAVIAVEPHVNQTNRQYVLFGENKQFNIENSSDKWKFFEMFKGNSQSDFSNRRTLTSSNRLVGMLKYGGRVWTFHGETPRATTDSSSTADLNNISIIIHSEFYIIPRSQESKCNEYINNGL

SEQ ID NO: 38 - protein, 183 aa, Artificial Sequence
  derived and/or modified protein sequence (wt) from RVA/DS-1/P[4]__CAD62680.1__VP8*(41-223)
AQTRYAPVNWGSWEINDSTTVEPVLDGPYQPTTFKPPNDYWLLISSNTNGVVYESTNNNDFWTAVSSVEPHVSQTNRQYILFGENKQFNVENNSDKWKFFETFTGSSQGNFSNRRTLTSSNRLVGMLKYGGRVWTFHGETPRATTDSSNTADLNNISIIIHSEFYIIPRSQESKCNEYINNGL

SEQ ID NO: 39 - protein, 183 aa, Artificial Sequence
  derived and/or modified protein sequence (wt) from RVA/DS-1/P[4]__ABV53252.1__VP8*(41-223)
AQTRYAPVNWGHGEINDSTTVEPVLDGPYQPTTFKPPNDYWLLISSNTNGVVYESTNNNDFWTAVIAVEPHVSQTNRQYILFGENKQFNVENNSDKWKFFEMFKGSSQGDFSNRRTLTSSNRLVGMLKYGGRVWTFHGETPRATTDSSNTADLNNISIIIHSEFYIIPRSQESKCNEYINNGL

SEQ ID NO: 40 - protein, 183 aa, Artificial Sequence
  derived and/or modified protein sequence (wt) from RVA/F01322/P[6]__AFA51886.1__VP8*(41-223)
AQTNYAPVTWSHGEVNDSTTIEPVLDGPYQPTNFKPPNDYWILLNPTNQQVVLEGTNKTDIWVALLLVEPNVTNQSRQYTLFGETKQITVENNTNKWKFFEMFRSSVSAEFQHKRTLTSDTKLAGFMKFYNSVWTFHGETPNATTDYSSTSNLFEVETVIHVEFYIIPRSQESKCSEYINTGL

SEQ ID NO: 41 - protein, 183 aa, Artificial Sequence
  derived and/or modified protein sequence (wt) from RVA/1076/P[6]__AAA47337.1__VP8*(41-223)
AQTNYAPVTWSHGEVNDSTTIEPVLDGPYQPTSFKPPSDYWILLNPTNQQVVLEGTNKTDIWVALLLVEPNVTNQSRQYTLFGETKQITVENNTNKWKFFEMFRSSVSAEFQHKRTLTSDTKLAGFLKFYNSVWTFYGETPHATTDYSSTSNLSEVETAIHVEFYIIPRSQESKCNEYINTGL

SEQ ID NO: 42 - protein, 183 aa, Artificial Sequence
  derived and/or modified protein sequence (wt) from RVA/BE1128/P[8]__AEX30671.1__VP8*(41-223)
AQTRYAPVNWGHGEINDSTTVEPILDGPYQPTTFTPPTDYWILITSNTNGVVYESTNNSDFWTAVIAVEPHVNPVDRQYNVFGENKQFNVRNDSDKWKFLEMFRGSSQNDFYNRRTLTSDTRLVGILKYGGRVWTFHGETPRATTDSSNTANLDGISITIHSEFYIIPRSQESKCNEYINNGL

SEQ ID NO: 43 - protein, 183 aa, Artificial Sequence
  derived and/or modified protein sequence (wt) from RVA/Wa-VirWa/P[8]__ACR22783.1__VP8*(41-223)
AQTRYAPVNWGHGEINDSTTVEPILDGPYQPTTFTPPNDYWILINSNTNGVVYESTNNSDFWTAVVAIEPHVNPVDRQYTIFGESKQFNVRNDSNKWKFLEMFRSSSQNEFYNRRTLTSDTRLVGILKYGGRVWTFHGETPRATTDSSSTANLNNISITIHSEFYIIPRSQESKCNEYINNGL

SEQ ID NO: 44 - protein, 183 aa, Artificial Sequence
  derived and/or modified protein sequence (wt) from RVA/Wa/P[8]__AAA47290.1__VP8*(41-223)
AQTRYAPVNWGHGEINDSTTVEPILDGPYQPTTFTPPNDYWILINSNTNGVVYESTNNSDFWTAVVAIEPHVNPVDRQYTIFGESKQFNVSNDSNKWKFLEMFRSSSQNEFYNRRTLTSDTRFVGILKYGGRVWTFHGETPRATTDSSSTANLNNISITIHSEFYIIPRSQESKCNEYINNGL

SEQ ID NO: 45 - protein, 183 aa, Artificial Sequence
  derived and/or modified protein sequence (wt) from RVA/Wa/P[8]__AAA66953.1__VP8*(41-223)
AQTRYAPVNWGHGEINDSTTVEPMLDGPYQPTTFTPPNDYWILINSNTNGVVYESTNNSDFWTAVVAIEPHVNPVDRQYTIFGESKQFNVSNDSNKWKFLEMFRSSSQNEFYNRRTLTSDTRFVGILKYGGRVWTFHGETPRATTDSSSTANLNNISITIHSEFYIIPRSQESKCNEYINNGL

SEQ ID NO: 46 - protein, 180 aa, Artificial Sequence; identical to SEQ ID NO: 6
  derived and/or modified protein sequence (artificial) from RVA/BE1058/P[4]__AEX30665.1__P2_VP8*(65-223)

SEQ ID NO: 47 - protein, 180 aa, Artificial Sequence
  derived and/or modified protein sequence (artificial) from RVA/DS-1/P[4]__CAD62680.1__P2_VP8*(65-223)
MQYIKANSKFIGITELGSGSGLDGPYQPTTFKPPNDYWLLISSNTNGVVYESTNNNDFWTAVSSVEPHVSQTNRQYILFGENKQFNVENNSDKWKFFETFTGSSQGNFSNRRTLTSSNRLVGMLKYGGRVWTFHGETPRATTDSSNTADLNNISIIIHSEFYIIPRSQESKCNEYINNGL

SEQ ID NO: 48 - protein, 180 aa, Artificial Sequence; identical to SEQ ID NO: 47
  derived and/or modified protein sequence (artificial) from RVA/DS-1/P[4]__ABV53252.1__P2_VP8*(65-223)

SEQ ID NO: 49 - protein, 180 aa, Artificial Sequence; identical to SEQ ID NO: 5
  derived and/or modified protein sequence (artificial) from RVA/F01322/P[6]__AFA51886.1__P2_VP8*(65-223)

SEQ ID NO: 50 - protein, 180 aa, Artificial Sequence
  derived and/or modified protein sequence (artificial) from RVA/1076/P[6]__AAA47337.1__P2_VP8*(65-223)
MQYIKANSKFIGITELGSGSGLDGPYQPTSFKPPSDYWILLNPTNQQVVLEGTNKTDIWVALLLVEPNVTNQSRQYTLFGETKQITVENNTNKWKFFEMFRSSVSAEFQHKRTLTSDTKLAGFLKFYNSVWTFYGETPHATTDYSSTSNLSEVETAIHVEFYIIPRSQESKCNEYINTGL

SEQ ID NO: 51 - protein, 180 aa, Artificial Sequence; identical to SEQ ID NO: 4
  derived and/or modified protein sequence (artificial) from RVA/BE1128/P[8]__AEX30671.1__P2_VP8*(65-223)

SEQ ID NO: 52 - protein, 180 aa, Artificial Sequence
  derived and/or modified protein sequence (artificial) from RVA/Wa-VirWa/P[8]__ACR22783.1__P2_VP8*(65-223)
MQYIKANSKFIGITELGSGSGLDGPYQPTTFTPPNDYWILINSNTNGVVYESTNNSDFWTAVVAIEPHVNPVDRQYTIFGESKQFNVRNDSNKWKFLEMFRSSSQNEFYNRRTLTSDTRLVGILKYGGRVWTFHGETPRATTDSSSTANLNNISITIHSEFYIIPRSQESKCNEYINNGL

SEQ ID NO: 53 - protein, 180 aa, Artificial Sequence
  derived and/or modified protein sequence (artificial) from RVA/Wa/P[8]__AAA47290.1__P2_VP8*(65-223)
MQYIKANSKFIGITELGSGSGLDGPYQPTTFTPPNDYWILINSNTNGVVYESTNNSDFWTAVVAIEPHVNPVDRQYTIFGESKQFNVSNDSNKWKFLEMFRSSSQNEFYNRRTLTSDTRFVGILKYGGRVWTFHGETPRATTDSSSTANLNNISITIHSEFYIIPRSQESKCNEYINNGL

SEQ ID NO: 54 - protein, 180 aa, Artificial Sequence; identical to SEQ ID NO: 53
  derived and/or modified protein sequence (artificial) from RVA/Wa/P[8]__AAA66953.1__P2_VP8*(65-223)

SEQ ID NO: 55 - protein, 204 aa, Artificial Sequence
  derived and/or modified protein sequence (artificial) from RVA/BE1058/P[4]__AEX30665.1__P2_VP8*(41-223)
MQYIKANSKFIGITELGSGSGAQTRYAPVNWGHGEINDSTTVEPVLDGPYQPTTFKPPNDYWLLISSNTDGVVYESTNNSDFWTAVIAVEPHVNQTNRQYVLFGENKQFNIENSSDKWKFFEMFKGNSQSDFSNRRTLTSSNRLVGMLKYGGRVWTFHGETPRATTDSSSTADLNNISIIIHSEFYIIPRSQESKCNEYINNGL

SEQ ID NO: 56 - protein, 204 aa, Artificial Sequence
  derived and/or modified protein sequence (artificial) from RVA/DS-1/P[4]__CAD62680.1__P2_VP8*(41-223)
MQYIKANSKFIGITELGSGSGAQTRYAPVNWGSWEINDSTTVEPVLDGPYQPTTFKPPNDYWLLISSNTNGVVYESTNNNDFWTAVSSVEPHVSQTNRQYILFGENKQFNVENNSDKWKFFETFTGSSQGNFSNRRTLTSSNRLVGMLKYGGRVWTFHGETPRATTDSSNTADLNNISIIIHSEFYIIPRSQESKCNEYINNGL

SEQ ID NO: 57 - protein, 204 aa, Artificial Sequence; identical to SEQ ID NO: 56
  derived and/or modified protein sequence (artificial) from RVA/DS-1/P[4]__ABV53252.1__P2_VP8*(41-223)

SEQ ID NO: 58 - protein, 204 aa, Artificial Sequence
  derived and/or modified protein sequence (artificial) from RVA/F01322/P[6]__AFA51886.1__P2_VP8*(41-223)
MQYIKANSKFIGITELGSGSGAQTNYAPVTWSHGEVNDSTTIEPVLDGPYQPTNFKPPNDYWILLNPTNQQVVLEGTNKTDIWVALLLVEPNVTNQSRQYTLFGETKQITVENNTNKWKFFEMFRSSVSAEFQHKRTLTSDTKLAGFMKFYNSVWTFHGETPNATTDYSSTSNLFEVETVIHVEFYIIPRSQESKCSEYINTGL

SEQ ID NO: 59 - protein, 204 aa, Artificial Sequence
  derived and/or modified protein sequence (artificial) from RVA/1076/P[6]__AAA47337.1__P2_VP8*(41-223)
MQYIKANSKFIGITELGSGSGAQTNYAPVTWSHGEVNDSTTIEPVLDGPYQPTSFKPPSDYWILLNPTNQQVVLEGTNKTDIWVALLLVEPNVTNQSRQYTLFGETKQITVENNTNKWKFFEMFRSSVSAEFQHKRTLTSDTKLAGFLKFYNSVWTFYGETPHATTDYSSTSNLSEVETAIHVEFYIIPRSQESKCNEYINTGL

SEQ ID NO: 60 - protein, 204 aa, Artificial Sequence
  derived and/or modified protein sequence (artificial) from RVA/BE1128/P[8]__AEX30671.1__P2_VP8*(41-223)
MQYIKANSKFIGITELGSGSGAQTRYAPVNWGHGEINDSTTVEPILDGPYQPTTFTPPTDYWILITSNTNGVVYESTNNSDFWTAVIAVEPHVNPVDRQYNVFGENKQFNVRNDSDKWKFLEMFRGSSQNDFYNRRTLTSDTRLVGILKYGGRVWTFHGETPRATTDSSNTANLDGISITIHSEFYIIPRSQESKCNEYINNGL

SEQ ID NO: 61 - protein, 204 aa, Artificial Sequence
  derived and/or modified protein sequence (artificial) from RVA/Wa-VirWa/P[8]__ACR22783.1__P2_VP8*(41-223)
MQYIKANSKFIGITELGSGSGAQTRYAPVNWGHGEINDSTTVEPILDGPYQPTTFTPPNDYWILINSNTNGVVYESTNNSDFWTAVVAIEPHVNPVDRQYTIFGESKQFNVRNDSNKWKFLEMFRSSSQNEFYNRRTLTSDTRLVGILKYGGRVWTFHGETPRATTDSSSTANLNNISITIHSEFYIIPRSQESKCNEYINNGL

SEQ ID NO: 62 - protein, 204 aa, Artificial Sequence
  derived and/or modified protein sequence (artificial) from RVA/Wa/P[8]__AAA47290.1__P2_VP8*(41-223)
MQYIKANSKFIGITELGSGSGAQTRYAPVNWGHGEINDSTTVEPILDGPYQPTTFTPPNDYWILINSNTNGVVYESTNNSDFWTAVVAIEPHVNPVDRQYTIFGESKQFNVSNDSNKWKFLEMFRSSSQNEFYNRRTLTSDTRFVGILKYGGRVWTFHGETPRATTDSSSTANLNNISITIHSEFYIIPRSQESKCNEYINNGL

SEQ ID NO: 63 - protein, 204 aa, Artificial Sequence
  derived and/or modified protein sequence (artificial) from RVA/Wa/P[8]__AAA66953.1__P2_VP8*(41-223)
MQYIKANSKFIGITELGSGSGAQTRYAPVNWGHGEINDSTTVEPMLDGPYQPTTFTPPNDYWILINSNTNGVVYESTNNSDFWTAVVAIEPHVNPVDRQYTIFGESKQFNVSNDSNKWKFLEMFRSSSQNEFYNRRTLTSDTRFVGILKYGGRVWTFHGETPRATTDSSSTANLNNISITIHSEFYIIPRSQESKCNEYINNGL

SEQ ID NO: 64 - protein, 346 aa, Artificial Sequence
  derived and/or modified protein sequence (artificial) from RVA/BE1058/P[4]__AEX30665.1__P2_VP8*(65-223)_Ferritin
MQYIKANSKFIGITELGSGSGLDGPYQPTTFKPPNDYWLLISSNTDGVVYESTNNSDFWTAVIAVEPHVNQTNRQYVLFGENKQFNIENSSDKWKFFEMFKGNSQSDFSNRRTLTSSNRLVGMLKYGGRVWTFHGETPRATTDSSSTADLNNISIIIHSEFYIIPRSQESKCNEYINNGLSGGDIIKLLNEQVNKEMQSSNLYMSMSSWCYTHSLDGAGLFLFDHAAEEYEHAKKLIIFLNENNVPVQLTSISAPEHKFEGLTQIFQKAYEHEQHISESINNIVDHAIKSKDHATFNFLQWYVAEQHEEEVLFKDILDKIELIGNENHGLYLADQYVKGIAKSRKS

SEQ ID NO: 65 - protein, 346 aa, Artificial Sequence
  derived and/or modified protein sequence (artificial) from RVA/DS-1/P[4]__CAD62680.1__P2_VP8*(65-223)_Ferritin
MQYIKANSKFIGITELGSGSGLDGPYQPTTFKPPNDYWLLISSNTNGVVYESTNNNDFWTAVSSVEPHVSQTNRQYILFGENKQFNVENNSDKWKFFETFTGSSQGNFSNRRTLTSSNRLVGMLKYGGRVWTFHGETPRATTDSSNTADLNNISIIIHSEFYIIPRSQESKCNEYINNGLSGGDIIKLLNEQVNKEMQSSNLYMSMSSWCYTHSLDGAGLFLFDHAAEEYEHAKKLIIFLNENNVPVQLTSISAPEHKFEGLTQIFQKAYEHEQHISESINNIVDHAIKSKDHATFNFLQWYVAEQHEEEVLFKDILDKIELIGNENHGLYLADQYVKGIAKSRKS

SEQ ID NO: 66 - protein, 346 aa, Artificial Sequence; identical to SEQ ID NO: 65
  derived and/or modified protein sequence (artificial) from RVA/DS-1/P[4]__ABV53252.1__P2_VP8*(65-223)_Ferritin

SEQ ID NO: 67 - protein, 346 aa, Artificial Sequence
  derived and/or modified protein sequence (artificial) from RVA/F01322/P[6]__AFA51886.1__P2_VP8*(65-223)_Ferritin
MQYIKANSKFIGITELGSGSGLDGPYQPTNFKPPNDYWILLNPTNQQVVLEGTNKTDIWVALLLVEPNVTNQSRQYTLFGETKQITVENNTNKWKFFEMFRSSVSAEFQHKRTLTSDTKLAGFMKFYNSVWTFHGETPNATTDYSSTSNLFEVETVIHVEFYIIPRSQESKCSEYINTGLSGGDIIKLLNEQVNKEMQSSNLYMSMSSWCYTHSLDGAGLFLFDHAAEEYEHAKKLIIFLNENNVPVQLTSISAPEHKFEGLTQIFQKAYEHEQHISESINNIVDHAIKSKDHATFNFLQWYVAEQHEEEVLFKDILDKIELIGNENHGLYLADQYVKGIAKSRKS

SEQ ID NO: 68 - protein, 346 aa, Artificial Sequence
  derived and/or modified protein sequence (artificial) from RVA/1076/P[6]__AAA47337.1__P2_VP8*(65-223)_Ferritin
MQYIKANSKFIGITELGSGSGLDGPYQPTSFKPPSDYWILLNPTNQQVVLEGTNKTDIWVALLLVEPNVTNQSRQYTLFGETKQITVENNTNKWKFFEMFRSSVSAEFQHKRTLTSDTKLAGFLKFYNSVWTFYGETPHATTDYSSTSNLSEVETAIHVEFYIIPRSQESKCNEYINTGLSGGDIIKLLNEQVNKEMQSSNLYMSMSSWCYTHSLDGAGLFLFDHAAEEYEHAKKLIIFLNENNVPVQLTSISAPEHKFEGLTQIFQKAYEHEQHISESINNIVDHAIKSKDHATFNFLQWYVAEQHEEEVLFKDILDKIELIGNENHGLYLADQYVKGIAKSRKS

SEQ ID NO: 69 - protein, 346 aa, Artificial Sequence
  derived and/or modified protein sequence (artificial) from RVA/BE1128/P[8]__AEX30671.1__P2_VP8*(65-223)_Ferritin
MQYIKANSKFIGITELGSGSGLDGPYQPTTFTPPTDYWILITSNTNGVVYESTNNSDFWTAVIAVEPHVNPVDRQYNVFGENKQFNVRNDSDKWKFLEMFRGSSQNDFYNRRTLTSDTRLVGILKYGGRVWTFHGETPRATTDSSNTANLDGISITIHSEFYIIPRSQESKCNEYINNGLSGGDIIKLLNEQVNKEMQSSNLYMSMSSWCYTHSLDGAGLFLFDHAAEEYEHAKKLIIFLNENNVPVQLTSISAPEHKFEGLTQIFQKAYEHEQHISESINNIVDHAIKSKDHATFNFLQWYVAEQHEEEVLFKDILDKIELIGNENHGLYLADQYVKGIAKSRKS

SEQ ID NO: 70 - protein, 346 aa, Artificial Sequence
  derived and/or modified protein sequence (artificial) from RVA/Wa-VirWa/P[8]__ACR22783.1__P2_VP8*(65-223)_Ferritin
MQYIKANSKFIGITELGSGSGLDGPYQPTTFTPPNDYWILINSNTNGVVYESTNNSDFWTAVVAIEPHVNPVDRQYTIFGESKQFNVRNDSNKWKFLEMFRSSSQNEFYNRRTLTSDTRLVGILKYGGRVWTFHGETPRATTDSSSTANLNNISITIHSEFYIIPRSQESKCNEYINNGLSGGDIIKLLNEQVNKEMQSSNLYMSMSSWCYTHSLDGAGLFLFDHAAEEYEHAKKLIIFLNENNVPVQLTSISAPEHKFEGLTQIFQKAYEHEQHISESINNIVDHAIKSKDHATFNFLQWYVAEQHEEEVLFKDILDKIELIGNENHGLYLADQYVKGIAKSRKS

SEQ ID NO: 71 - protein, 346 aa, Artificial Sequence
  derived and/or modified protein sequence (artificial) from RVA/Wa/P[8]__AAA47290.1__P2_VP8*(65-223)_Ferritin
MQYIKANSKFIGITELGSGSGLDGPYQPTTFTPPNDYWILINSNTNGVVYESTNNSDFWTAVVAIEPHVNPVDRQYTIFGESKQFNVSNDSNKWKFLEMFRSSSQNEFYNRRTLTSDTRFVGILKYGGRVWTFHGETPRATTDSSSTANLNNISITIHSEFYIIPRSQESKCNEYINNGLSGGDIIKLLNEQVNKEMQSSNLYMSMSSWCYTHSLDGAGLFLFDHAAEEYEHAKKLIIFLNENNVPVQLTSISAPEHKFEGLTQIFQKAYEHEQHISESINNIVDHAIKSKDHATFNFLQWYVAEQHEEEVLFKDILDKIELIGNENHGLYLADQYVKGIAKSRKS

SEQ ID NO: 72 - protein, 346 aa, Artificial Sequence; identical to SEQ ID NO: 71
  derived and/or modified protein sequence (artificial) from RVA/Wa/P[8]__AAA66953.1__P2_VP8*(65-223)_Ferritin

SEQ ID NO: 73 - protein, 370 aa, Artificial Sequence
  derived and/or modified protein sequence (artificial) from RVA/BE1058/P[4]__AEX30665.1__P2_VP8*(41-223)_Ferritin
MQYIKANSKFIGITELGSGSGAQTRYAPVNWGHGEINDSTTVEPVLDGPYQPTTFKPPNDYWLLISSNTDGVVYESTNNSDFWTAVIAVEPHVNQTNRQYVLFGENKQFNIENSSDKWKFFEMFKGNSQSDFSNRRTLTSSNRLVGMLKYGGRVWTFHGETPRATTDSSSTADLNNISIIIHSEFYIIPRSQESKCNEYINNGLSGGDIIKLLNEQVNKEMQSSNLYMSMSSWCYTHSLDGAGLFLFDHAAEEYEHAKKLIIFLNENNVPVQLTSISAPEHKFEGLTQIFQKAYEHEQHISESINNIVDHAIKSKDHATFNFLQWYVAEQHEEEVLFKDILDKIELIGNENHGLYLADQYVKGIAKSRKS

SEQ ID NO: 74 - protein, 370 aa, Artificial Sequence
  derived and/or modified protein sequence (artificial) from RVA/DS-1/P[4]__CAD62680.1__P2_VP8*(41-223)_Ferritin
MQYIKANSKFIGITELGSGSGAQTRYAPVNWGSWEINDSTTVEPVLDGPYQPTTFKPPNDYWLLISSNTNGVVYESTNNNDFWTAVSSVEPHVSQTNRQYILFGENKQFNVENNSDKWKFFETFTGSSQGNFSNRRTLTSSNRLVGMLKYGGRVWTFHGETPRATTDSSNTADLNNISIIIHSEFYIIPRSQESKCNEYINNGLSGGDIIKLLNEQVNKEMQSSNLYMSMSSWCYTHSLDGAGLFLFDHAAEEYEHAKKLIIFLNENNVPVQLTSISAPEHKFEGLTQIFQKAYEHEQHISESINNIVDHAIKSKDHATFNFLQWYVAEQHEEEVLFKDILDKIELIGNENHGLYLADQYVKGIAKSRKS

SEQ ID NO: 75 - protein, 370 aa, Artificial Sequence; identical to SEQ ID NO: 74
  derived and/or modified protein sequence (artificial) from RVA/DS-1/P[4]__ABV53252.1__P2_VP8*(41-223)_Ferritin

SEQ ID NO: 76 - protein, 370 aa, Artificial Sequence
  derived and/or modified protein sequence (artificial) from RVA/F01322/P[6]__AFA51886.1__P2_VP8*(41-223)_Ferritin
MQYIKANSKFIGITELGSGSGAQTNYAPVTWSHGEVNDSTTIEPVLDGPYQPTNFKPPNDYWILLNPTNQQVVLEGTNKTDIWVALLLVEPNVTNQSRQYTLFGETKQITVENNTNKWKFFEMFRSSVSAEFQHKRTLTSDTKLAGFMKFYNSVWTFHGETPNATTDYSSTSNLFEVETVIHVEFYIIPRSQESKCSEYINTGLSGGDIIKLLNEQVNKEMQSSNLYMSMSSWCYTHSLDGAGLFLFDHAAEEYEHAKKLIIFLNENNVPVQLTSISAPEHKFEGLTQIFQKAYEHEQHISESINNIVDHAIKSKDHATFNFLQWYVAEQHEEEVLFKDILDKIELIGNENHGLYLADQYVKGIAKSRKS

SEQ ID NO: 77 - protein, 370 aa, Artificial Sequence
  derived and/or modified protein sequence (artificial) from RVA/1076/P[6]__AAA47337.1__P2_VP8*(41-223)_Ferritin
MQYIKANSKFIGITELGSGSGAQTNYAPVTWSHGEVNDSTTIEPVLDGPYQPTSFKPPSDYWILLNPTNQQVVLEGTNKTDIWVALLLVEPNVTNQSRQYTLFGETKQITVENNTNKWKFFEMFRSSVSAEFQHKRTLTSDTKLAGFLKFYNSVWTFYGETPHATTDYSSTSNLSEVETAIHVEFYIIPRSQESKCNEYINTGLSGGDIIKLLNEQVNKEMQSSNLYMSMSSWCYTHSLDGAGLFLFDHAAEEYEHAKKLIIFLNENNVPVQLTSISAPEHKFEGLTQIFQKAYEHEQHISESINNIVDHAIKSKDHATFNFLQWYVAEQHEEEVLFKDILDKIELIGNENHGLYLADQYVKGIAKSRKS

SEQ ID NO: 78 - protein, 370 aa, Artificial Sequence
  derived and/or modified protein sequence (artificial) from RVA/BE1128/P[8]__AEX30671.1__P2_VP8*(41-223)_Ferritin
MQYIKANSKFIGITELGSGSGAQTRYAPVNWGHGEINDSTTVEPILDGPYQPTTFTPPTDYWILITSNTNGVVYESTNNSDFWTAVIAVEPHVNPVDRQYNVFGENKQFNVRNDSDKWKFLEMFRGSSQNDFYNRRTLTSDTRLVGILKYGGRVWTFHGETPRATTDSSNTANLDGISITIHSEFYIIPRSQESKCNEYINNGLSGGDIIKLLNEQVNKEMQSSNLYMSMSSWCYTHSLDGAGLFLFDHAAEEYEHAKKLIIFLNENNVPVQLTSISAPEHKFEGLTQIFQKAYEHEQHISESINNIVDHAIKSKDHATFNFLQWYVAEQHEEEVLFKDILDKIELIGNENHGLYLADQYVKGIAKSRKS

SEQ ID NO: 79 - protein, 370 aa, Artificial Sequence
  derived and/or modified protein sequence (artificial) from RVA/Wa-VirWa/P[8]__ACR22783.1__P2_VP8*(41-223)_Ferritin
MQYIKANSKFIGITELGSGSGAQTRYAPVNWGHGEINDSTTVEPILDGPYQPTTFTPPNDYWILINSNTNGVVYESTNNSDFWTAVVAIEPHVNPVDRQYTIFGESKQFNVRNDSNKWKFLEMFRSSSQNEFYNRRTLTSDTRLVGILKYGGRVWTFHGETPRATTDSSSTANLNNISITIHSEFYIIPRSQESKCNEYINNGLSGGDIIKLLNEQVNKEMQSSNLYMSMSSWCYTHSLDGAGLFLFDHAAEEYEHAKKLIIFLNENNVPVQLTSISAPEHKFEGLTQIFQKAYEHEQHISESINNIVDHAIKSKDHATFNFLQWYVAEQHEEEVLFKDILDKIELIGNENHGLYLADQYVKGIAKSRKS

SEQ ID NO: 80 - protein, 370 aa, Artificial Sequence
  derived and/or modified protein sequence (artificial) from RVA/Wa/P[8]__AAA47290.1__P2_VP8*(41-223)_Ferritin
MQYIKANSKFIGITELGSGSGAQTRYAPVNWGHGEINDSTTVEPILDGPYQPTTFTPPNDYWILINSNTNGVVYESTNNSDFWTAVVAIEPHVNPVDRQYTIFGESKQFNVSNDSNKWKFLEMFRSSSQNEFYNRRTLTSDTRFVGILKYGGRVWTFHGETPRATTDSSSTANLNNISITIHSEFYIIPRSQESKCNEYINNGLSGGDIIKLLNEQVNKEMQSSNLYMSMSSWCYTHSLDGAGLFLFDHAAEEYEHAKKLIIFLNENNVPVQLTSISAPEHKFEGLTQIFQKAYEHEQHISESINNIVDHAIKSKDHATFNFLQWYVAEQHEEEVLFKDILDKIELIGNENHGLYLADQYVKGIAKSRKS

SEQ ID NO: 81 - protein, 370 aa, Artificial Sequence
  derived and/or modified protein sequence (artificial) from RVA/Wa/P[8]__AAA66953.1__P2_VP8*(41-223)_Ferritin
MQYIKANSKFIGITELGSGSGAQTRYAPVNWGHGEINDSTTVEPMLDGPYQPTTFTPPNDYWILINSNTNGVVYESTNNSDFWTAVVAIEPHVNPVDRQYTIFGESKQFNVSNDSNKWKFLEMFRSSSQNEFYNRRTLTSDTRFVGILKYGGRVWTFHGETPRATTDSSSTANLNNISITIHSEFYIIPRSQESKCNEYINNGLSGGDIIKLLNEQVNKEMQSSNLYMSMSSWCYTHSLDGAGLFLFDHAAEEYEHAKKLIIFLNENNVPVQLTSISAPEHKFEGLTQIFQKAYEHEQHISESINNIVDHAIKSKDHATFNFLQWYVAEQHEEEVLFKDILDKIELIGNENHGLYLADQYVKGIAKSRKS

SEQ ID NO: 82 - protein, 348 aa, Artificial Sequence
  derived and/or modified protein sequence (artificial) from RVA/BE1058/P[4]__AEX30665.1__LumSynt_P2_VP8*(65-223)
MQIYEGKLTAEGLRFGIVASRFNHALVDRLVEGAIDAIVRHGGREEDITLVRVPGSWEIPVAAGELARKEDIDAVIAIGVLIRGATPHFDYIASEVSKGLADLSLELRKPITFGVITADTLEQAIERAGTKHGNKGWEAALSAIEMANLFKSLRGGSGGSGGSGGSGGGQYIKANSKFIGITELGSGSGLDGPYQPTTFKPPNDYWLLISSNTDGVVYESTNNSDFWTAVIAVEPHVNQTNRQYVLFGENKQFNIENSSDKWKFFEMFKGNSQSDFSNRRTLTSSNRLVGMLKYGGRVWTFHGETPRATTDSSSTADLNNISIIIHSEFYIIPRSQESKCNEYINNGL

SEQ ID NO: 83 - protein, 348 aa, Artificial Sequence
  derived and/or modified protein sequence (artificial) from RVA/DS-1/P[4]__CAD62680.1__LumSynt_P2_VP8*(65-223)
MQIYEGKLTAEGLRFGIVASRFNHALVDRLVEGAIDAIVRHGGREEDITLVRVPGSWEIPVAAGELARKEDIDAVIAIGVLIRGATPHFDYIASEVSKGLADLSLELRKPITFGVITADTLEQAIERAGTKHGNKGWEAALSAIEMANLFKSLRGGSGGSGGSGGSGGGQYIKANSKFIGITELGSGSGLDGPYQPTTFKPPNDYWLLISSNTNGVVYESTNNNDFWTAVSSVEPHVSQTNRQYILFGENKQFNVENNSDKWKFFETFTGSSQGNFSNRRTLTSSNRLVGMLKYGGRVWTFHGETPRATTDSSNTADLNNISIIIHSEFYIIPRSQESKCNEYINNGL

SEQ ID NO: 84 - protein, 348 aa, Artificial Sequence; identical to SEQ ID NO: 83
  derived and/or modified protein sequence (artificial) from RVA/DS-1/P[4]__ABV53252.1__LumSynt_P2_VP8*(65-223)

SEQ ID NO: 85 - protein, 348 aa, Artificial Sequence
  derived and/or modified protein sequence (artificial) from RVA/F01322/P[6]__AFA51886.1__LumSynt_P2_VP8*(65-223)
MQIYEGKLTAEGLRFGIVASRFNHALVDRLVEGAIDAIVRHGGREEDITLVRVPGSWEIPVAAGELARKEDIDAVIAIGVLIRGATPHFDYIASEVSKGLADLSLELRKPITFGVITADTLEQAIERAGTKHGNKGWEAALSAIEMANLFKSLRGGSGGSGGSGGSGGGQYIKANSKFIGITELGSGSGLDGPYQPTNFKPPNDYWILLNPTNQQVVLEGTNKTDIWVALLLVEPNVTNQSRQYTLFGETKQITVENNTNKWKFFEMFRSSVSAEFQHKRTLTSDTKLAGFMKFYNSVWTFHGETPNATTDYSSTSNLFEVETVIHVEFYIIPRSQESKCSEYINTGL

SEQ ID NO: 86 - protein, 348 aa, Artificial Sequence
  derived and/or modified protein sequence (artificial) from RVA/1076/P[6]__AAA47337.1__LumSynt_P2_VP8*(65-223)
MQIYEGKLTAEGLRFGIVASRFNHALVDRLVEGAIDAIVRHGGREEDITLVRVPGSWEIPVAAGELARKEDIDAVIAIGVLIRGATPHFDYIASEVSKGLADLSLELRKPITFGVITADTLEQAIERAGTKHGNKGWEAALSAIEMANLFKSLRGGSGGSGGSGGSGGGQYIKANSKFIGITELGSGSGLDGPYQPTSFKPPSDYWILLNPTNQQVVLEGTNKTDIWVALLLVEPNVTNQSRQYTLFGETKQITVENNTNKWKFFEMFRSSVSAEFQHKRTLTSDTKLAGFLKFYNSVWTFYGETPHATTDYSSTSNLSEVETAIHVEFYIIPRSQESKCNEYINTGL

SEQ ID NO: 87 - protein, 348 aa, Artificial Sequence
  derived and/or modified protein sequence (artificial) from RVA/BE1128/P[8]__AEX30671.1__LumSynt_P2_VP8*(65-223)
MQIYEGKLTAEGLRFGIVASRFNHALVDRLVEGAIDAIVRHGGREEDITLVRVPGSWEIPVAAGELARKEDIDAVIAIGVLIRGATPHFDYIASEVSKGLADLSLELRKPITFGVITADTLEQAIERAGTKHGNKGWEAALSAIEMANLFKSLRGGSGGSGGSGGSGGGQYIKANSKFIGITELGSGSGLDGPYQPTTFTPPTDYWILITSNTNGVVYESTNNSDFWTAVIAVEPHVNPVDRQYNVFGENKQFNVRNDSDKWKFLEMFRGSSQNDFYNRRTLTSDTRLVGILKYGGRVWTFHGETPRATTDSSNTANLDGISITIHSEFYIIPRSQESKCNEYINNGL

SEQ ID NO: 88 - protein, 348 aa, Artificial Sequence
  derived and/or modified protein sequence (artificial) from RVA/Wa-VirWa/P[8]__ACR22783.1__LumSynt_P2_VP8*(65-223)
MQIYEGKLTAEGLRFGIVASRFNHALVDRLVEGAIDAIVRHGGREEDITLVRVPGSWEIPVAAGELARKEDIDAVIAIGVLIRGATPHFDYIASEVSKGLADLSLELRKPITFGVITADTLEQAIERAGTKHGNKGWEAALSAIEMANLFKSLRGGSGGSGGSGGSGGGQYIKANSKFIGITELGSGSGLDGPYQPTTFTPPNDYWILINSNTNGVVYESTNNSDFWTAVVAIEPHVNPVDRQYTIFGESKQFNVRNDSNKWKFLEMFRSSSQNEFYNRRTLTSDTRLVGILKYGGRVWTFHGETPRATTDSSSTANLNNISITIHSEFYIIPRSQESKCNEYINNGL

SEQ ID NO: 89 - protein, 348 aa, Artificial Sequence
  derived and/or modified protein sequence (artificial) from RVA/Wa/P[8]__AAA47290.1__LumSynt_P2_VP8*(65-223)
MQIYEGKLTAEGLRFGIVASRFNHALVDRLVEGAIDAIVRHGGREEDITLVRVPGSWEIPVAAGELARKEDIDAVIAIGVLIRGATPHFDYIASEVSKGLADLSLELRKPITFGVITADTLEQAIERAGTKHGNKGWEAALSAIEMANLFKSLRGGSGGSGGSGGSGGGQYIKANSKFIGITELGSGSGLDGPYQPTTFTPPNDYWILINSNTNGVVYESTNNSDFWTAVVAIEPHVNPVDRQYTIFGESKQFNVSNDSNKWKFLEMFRSSSQNEFYNRRTLTSDTRFVGILKYGGRVWTFHGETPRATTDSSSTANLNNISITIHSEFYIIPRSQESKCNEYINNGL

SEQ ID NO: 90 - protein, 348 aa, Artificial Sequence; identical to SEQ ID NO: 89
  derived and/or modified protein sequence (artificial) from RVA/Wa/P[8]__AAA66953.1__LumSynt_P2_VP8*(65-223)

SEQ ID NO: 91 - protein, 372 aa, Artificial Sequence; identical to SEQ ID NO: 3
  derived and/or modified protein sequence (artificial) from RVA/BE1058/P[4]__AEX30665.1__LumSynt_P2_VP8*(41-223)

SEQ ID NO: 92 - protein, 372 aa, Artificial Sequence
  derived and/or modified protein sequence (artificial) from RVA/DS-1/P[4]__CAD62680.1__LumSynt_P2_VP8*(41-223)
MQIYEGKLTAEGLRFGIVASRFNHALVDRLVEGAIDAIVRHGGREEDITLVRVPGSWEIPVAAGELARKEDIDAVIAIGVLIRGATPHFDYIASEVSKGLADLSLELRKPITFGVITADTLEQAIERAGTKHGNKGWEAALSAIEMANLFKSLRGGSGGSGGSGGSGGGQYIKANSKFIGITELGSGSGAQTRYAPVNWGSWEINDSTTVEPVLDGPYQPTTFKPPNDYWLLISSNTNGVVYESTNNNDFWTAVSSVEPHVSQTNRQYILFGENKQFNVENNSDKWKFFETFTGSSQGNFSNRRTLTSSNRLVGMLKYGGRVWTFHGETPRATTDSSNTADLNNISIIIHSEFYIIPRSQESKCNEYINNGL

SEQ ID NO: 93 - protein, 372 aa, Artificial Sequence; identical to SEQ ID NO: 92
  derived and/or modified protein sequence (artificial) from RVA/DS-1/P[4]__ABV53252.1__LumSynt_P2_VP8*(41-223)

SEQ ID NO: 94 - protein, 372 aa, Artificial Sequence; identical to SEQ ID NO: 2
  derived and/or modified protein sequence (artificial) from RVA/F01322/P[6]__AFA51886.1__LumSynt_P2_VP8*(41-223)

SEQ ID NO: 95 - protein, 372 aa, Artificial Sequence
  derived and/or modified protein sequence (artificial) from RVA/1076/P[6]__AAA47337.1__LumSynt_P2_VP8*(41-223)
MQIYEGKLTAEGLRFGIVASRFNHALVDRLVEGAIDAIVRHGGREEDITLVRVPGSWEIPVAAGELARKEDIDAVIAIGVLIRGATPHFDYIASEVSKGLADLSLELRKPITFGVITADTLEQAIERAGTKHGNKGWEAALSAIEMANLFKSLRGGSGGSGGSGGSGGGQYIKANSKFIGITELGSGSGAQTNYAPVTWSHGEVNDSTTIEPVLDGPYQPTSFKPPSDYWILLNPTNQQVVLEGTNKTDIWVALLLVEPNVTNQSRQYTLFGETKQITVENNTNKWKFFEMFRSSVSAEFQHKRTLTSDTKLAGFLKFYNSVWTFYGETPHATTDYSSTSNLSEVETAIHVEFYIIPRSQESKCNEYINTGL

SEQ ID NO: 96 - protein, 372 aa, Artificial Sequence; identical to SEQ ID NO: 1
  derived and/or modified protein sequence (artificial) from RVA/BE1128/P[8]__AEX30671.1__LumSynt_P2_VP8*(41-223)

SEQ ID NO: 97 - protein, 372 aa, Artificial Sequence
  derived and/or modified protein sequence (artificial) from RVA/Wa-VirWa/P[8]__ACR22783.1__LumSynt_P2_VP8*(41-223)
MQIYEGKLTAEGLRFGIVASRFNHALVDRLVEGAIDAIVRHGGREEDITLVRVPGSWEIPVAAGELARKEDIDAVIAIGVLIRGATPHFDYIASEVSKGLADLSLELRKPITFGVITADTLEQAIERAGTKHGNKGWEAALSAIEMANLFKSLRGGSGGSGGSGGSGGGQYIKANSKFIGITELGSGSGAQTRYAPVNWGHGEINDSTTVEPILDGPYQPTTFTPPNDYWILINSNTNGVVYESTNNSDFWTAVVAIEPHVNPVDRQYTIFGESKQFNVRNDSNKWKFLEMFRSSSQNEFYNRRTLTSDTRLVGILKYGGRVWTFHGETPRATTDSSSTANLNNISITIHSEFYIIPRSQESKCNEYINNGL

SEQ ID NO: 98 - protein, 372 aa, Artificial Sequence
  derived and/or modified protein sequence (artificial) from RVA/Wa/P[8]__AAA47290.1__LumSynt_P2_VP8*(41-223)
MQIYEGKLTAEGLRFGIVASRFNHALVDRLVEGAIDAIVRHGGREEDITLVRVPGSWEIPVAAGELARKEDIDAVIAIGVLIRGATPHFDYIASEVSKGLADLSLELRKPITFGVITADTLEQAIERAGTKHGNKGWEAALSAIEMANLFKSLRGGSGGSGGSGGSGGGQYIKANSKFIGITELGSGSGAQTRYAPVNWGHGEINDSTTVEPILDGPYQPTTFTPPNDYWILINSNTNGVVYESTNNSDFWTAVVAIEPHVNPVDRQYTIFGESKQFNVSNDSNKWKFLEMFRSSSQNEFYNRRTLTSDTRFVGILKYGGRVWTFHGETPRATTDSSSTANLNNISITIHSEFYIIPRSQESKCNEYINNGL

SEQ ID NO: 99 - protein, 372 aa, Artificial Sequence
  derived and/or modified protein sequence (artificial) from RVA/Wa/P[8]__AAA66953.1__LumSynt_P2_VP8*(41-223)
MQIYEGKLTAEGLRFGIVASRFNHALVDRLVEGAIDAIVRHGGREEDITLVRVPGSWEIPVAAGELARKEDIDAVIAIGVLIRGATPHFDYIASEVSKGLADLSLELRKPITFGVITADTLEQAIERAGTKHGNKGWEAALSAIEMANLFKSLRGGSGGSGGSGGSGGGQYIKANSKFIGITELGSGSGAQTRYAPVNWGHGEINDSTTVEPMLDGPYQPTTFTPPNDYWILINSNTNGVVYESTNNSDFWTAVVAIEPHVNPVDRQYTIFGESKQFNVSNDSNKWKFLEMFRSSSQNEFYNRRTLTSDTRFVGILKYGGRVWTFHGETPRATTDSSSTANLNNISITIHSEFYIIPRSQESKCNEYINNGL

SEQ ID NO: 100 - protein, 197 aa, Artificial Sequence
  derived and/or modified protein sequence (artificial) from RVA/BE1058/P[4]__AEX30665.1__SP-IgE_P2_VP8*(65-223)
MDWTWILFLVAAATRVHSQYIKANSKFIGITELGSGSGLDGPYQPTTFKPPNDYWLLISSNTDGVVYESTNNSDFWTAVIAVEPHVNQTNRQYVLFGENKQFNIENSSDKWKFFEMFKGNSQSDFSNRRTLTSSNRLVGMLKYGGRVWTFHGETPRATTDSSSTADLNNISIIIHSEFYIIPRSQESKCNEYINNGL

SEQ ID NO: 101 - protein, 197 aa, Artificial Sequence
  derived and/or modified protein sequence (artificial) from RVA/DS-1/P[4]__CAD62680.1__SP-IgE_P2_VP8*(65-223)
MDWTWILFLVAAATRVHSQYIKANSKFIGITELGSGSGLDGPYQPTTFKPPNDYWLLISSNTNGVVYESTNNNDFWTAVSSVEPHVSQTNRQYILFGENKQFNVENNSDKWKFFETFTGSSQGNFSNRRTLTSSNRLVGMLKYGGRVWTFHGETPRATTDSSNTADLNNISIIIHSEFYIIPRSQESKCNEYINNGL

SEQ ID NO: 102 - protein, 197 aa, Artificial Sequence; identical to SEQ ID NO: 101
  derived and/or modified protein sequence (artificial) from RVA/DS-1/P[4]__ABV53252.1__SP-IgE_P2_VP8*(65-223)

SEQ ID NO: 103 - protein, 197 aa, Artificial Sequence
  derived and/or modified protein sequence (artificial) from RVA/F01322/P[6]__AFA51886.1__SP-IgE_P2_VP8*(65-223)
MDWTWILFLVAAATRVHSQYIKANSKFIGITELGSGSGLDGPYQPTNFKPPNDYWILLNPTNQQVVLEGTNKTDIWVALLLVEPNVTNQSRQYTLFGETKQITVENNTNKWKFFEMFRSSVSAEFQHKRTLTSDTKLAGFMKFYNSVWTFHGETPNATTDYSSTSNLFEVETVIHVEFYIIPRSQESKCSEYINTGL

SEQ ID NO: 104 - protein, 197 aa, Artificial Sequence
  derived and/or modified protein sequence (artificial) from RVA/1076/P[6]__AAA47337.1__SP-IgE_P2_VP8*(65-223)
MDWTWILFLVAAATRVHSQYIKANSKFIGITELGSGSGLDGPYQPTSFKPPSDYWILLNPTNQQVVLEGTNKTDIWVALLLVEPNVTNQSRQYTLFGETKQITVENNTNKWKFFEMFRSSVSAEFQHKRTLTSDTKLAGFLKFYNSVWTFYGETPHATTDYSSTSNLSEVETAIHVEFYIIPRSQESKCNEYINTGL

SEQ ID NO: 105 - protein, 197 aa, Artificial Sequence
  derived and/or modified protein sequence (artificial) from RVA/BE1128/P[8]__AEX30671.1__SP-IgE_P2_VP8*(65-223)
MDWTWILFLVAAATRVHSQYIKANSKFIGITELGSGSGLDGPYQPTTFTPPTDYWILITSNTNGVVYESTNNSDFWTAVIAVEPHVNPVDRQYNVFGENKQFNVRNDSDKWKFLEMFRGSSQNDFYNRRTLTSDTRLVGILKYGGRVWTFHGETPRATTDSSNTANLDGISITIHSEFYIIPRSQESKCNEYINNGL

SEQ ID NO: 106 - protein, 197 aa, Artificial Sequence
  derived and/or modified protein sequence (artificial) from RVA/Wa-VirWa/P[8]__ACR22783.1__SP-IgE_P2_VP8*(65-223)
MDWTWILFLVAAATRVHSQYIKANSKFIGITELGSGSGLDGPYQPTTFTPPNDYWILINSNTNGVVYESTNNSDFWTAVVAIEPHVNPVDRQYTIFGESKQFNVRNDSNKWKFLEMFRSSSQNEFYNRRTLTSDTRLVGILKYGGRVWTFHGETPRATTDSSSTANLNNISITIHSEFYIIPRSQESKCNEYINNGL

SEQ ID NO: 107 - protein, 197 aa, Artificial Sequence
  derived and/or modified protein sequence (artificial) from RVA/Wa/P[8]__AAA47290.1__SP-IgE_P2_VP8*(65-223)
MDWTWILFLVAAATRVHSQYIKANSKFIGITELGSGSGLDGPYQPTTFTPPNDYWILINSNTNGVVYESTNNSDFWTAVVAIEPHVNPVDRQYTIFGESKQFNVSNDSNKWKFLEMFRSSSQNEFYNRRTLTSDTRFVGILKYGGRVWTFHGETPRATTDSSSTANLNNISITIHSEFYIIPRSQESKCNEYINNGL

SEQ ID NO: 108 - protein, 197 aa, Artificial Sequence; identical to SEQ ID NO: 107
  derived and/or modified protein sequence (artificial) from RVA/Wa/P[8]__AAA66953.1__SP-IgE_P2_VP8*(65-223)

SEQ ID NO: 109 - protein, 221 aa, Artificial Sequence
  derived and/or modified protein sequence (artificial) from RVA/BE1058/P[4]__AEX30665.1__SP-IgE_P2_VP8*(41-223)
MDWTWILFLVAAATRVHSQYIKANSKFIGITELGSGSGAQTRYAPVNWGHGEINDSTTVEPVLDGPYQPTTFKPPNDYWLLISSNTDGVVYESTNNSDFWTAVIAVEPHVNQTNRQYVLFGENKQFNIENSSDKWKFFEMFKGNSQSDFSNRRTLTSSNRLVGMLKYGGRVWTFHGETPRATTDSSSTADLNNISIIIHSEFYIIPRSQESKCNEYINNGL

SEQ ID NO: 110 - protein, 221 aa, Artificial Sequence
  derived and/or modified protein sequence (artificial) from RVA/DS-1/P[4]__CAD62680.1__SP-IgE_P2_VP8*(41-223)
MDWTWILFLVAAATRVHSQYIKANSKFIGITELGSGSGAQTRYAPVNWGSWEINDSTTVEPVLDGPYQPTTFKPPNDYWLLISSNTNGVVYESTNNNDFWTAVSSVEPHVSQTNRQYILFGENKQFNVENNSDKWKFFETFTGSSQGNFSNRRTLTSSNRLVGMLKYGGRVWTFHGETPRATTDSSNTADLNNISIIIHSEFYIIPRSQESKCNEYINNGL

SEQ ID NO: 111 - protein, 221 aa, Artificial Sequence; identical to SEQ ID NO: 110
  derived and/or modified protein sequence (artificial) from RVA/DS-1/P[4]__ABV53252.1__SP-IgE_P2_VP8*(41-223)

SEQ ID NO: 112 - protein, 221 aa, Artificial Sequence
  derived and/or modified protein sequence (artificial) from RVA/F01322/P[6]__AFA51886.1__SP-IgE_P2_VP8*(41-223)
MDWTWILFLVAAATRVHSQYIKANSKFIGITELGSGSGAQTNYAPVTWSHGEVNDSTTIEPVLDGPYQPTNFKPPNDYWILLNPTNQQVVLEGTNKTDIWVALLLVEPNVTNQSRQYTLFGETKQITVENNTNKWKFFEMFRSSVSAEFQHKRTLTSDTKLAGFMKFYNSVWTFHGETPNATTDYSSTSNLFEVETVIHVEFYIIPRSQESKCSEYINTGL

SEQ ID NO: 113 - protein, 221 aa, Artificial Sequence
  derived and/or modified protein sequence (artificial) from RVA/1076/P[6]__AAA47337.1__SP-IgE_P2_VP8*(41-223)
MDWTWILFLVAAATRVHSQYIKANSKFIGITELGSGSGAQTNYAPVTWSHGEVNDSTTIEPVLDGPYQPTSFKPPSDYWILLNPTNQQVVLEGTNKTDIWVALLLVEPNVTNQSRQYTLFGETKQITVENNTNKWKFFEMFRSSVSAEFQHKRTLTSDTKLAGFLKFYNSVWTFYGETPHATTDYSSTSNLSEVETAIHVEFYIIPRSQESKCNEYINTGL

SEQ ID NO: 114 - protein, 221 aa, Artificial Sequence
  derived and/or modified protein sequence (artificial) from RVA/BE1128/P[8]__AEX30671.1__SP-IgE_P2_VP8*(41-223)
MDWTWILFLVAAATRVHSQYIKANSKFIGITELGSGSGAQTRYAPVNWGHGEINDSTTVEPILDGPYQPTTFTPPTDYWILITSNTNGVVYESTNNSDFWTAVIAVEPHVNPVDRQYNVFGENKQFNVRNDSDKWKFLEMFRGSSQNDFYNRRTLTSDTRLVGILKYGGRVWTFHGETPRATTDSSNTANLDGISITIHSEFYIIPRSQESKCNEYINNGL

SEQ ID NO: 115 - protein, 221 aa, Artificial Sequence
  derived and/or modified protein sequence (artificial) from RVA/Wa-VirWa/P[8]__ACR22783.1__SP-IgE_P2_VP8*(41-223)
MDWTWILFLVAAATRVHSQYIKANSKFIGITELGSGSGAQTRYAPVNWGHGEINDSTTVEPILDGPYQPTTFTPPNDYWILINSNTNGVVYESTNNSDFWTAVVAIEPHVNPVDRQYTIFGESKQFNVRNDSNKWKFLEMFRSSSQNEFYNRRTLTSDTRLVGILKYGGRVWTFHGETPRATTDSSSTANLNNISITIHSEFYIIPRSQESKCNEYINNGL

SEQ ID NO: 116 - protein, 221 aa, Artificial Sequence
  derived and/or modified protein sequence (artificial) from RVA/Wa/P[8]__AAA47290.1__SP-IgE_P2_VP8*(41-223)
MDWTWILFLVAAATRVHSQYIKANSKFIGITELGSGSGAQTRYAPVNWGHGEINDSTTVEPILDGPYQPTTFTPPNDYWILINSNTNGVVYESTNNSDFWTAVVAIEPHVNPVDRQYTIFGESKQFNVSNDSNKWKFLEMFRSSSQNEFYNRRTLTSDTRFVGILKYGGRVWTFHGETPRATTDSSSTANLNNISITIHSEFYIIPRSQESKCNEYINNGL

SEQ ID NO: 117 - protein, 221 aa, Artificial Sequence
  derived and/or modified protein sequence (artificial) from RVA/Wa/P[8]__AAA66953.1__SP-IgE_P2_VP8*(41-223)
MDWTWILFLVAAATRVHSQYIKANSKFIGITELGSGSGAQTRYAPVNWGHGEINDSTTVEPMLDGPYQPTTFTPPNDYWILINSNTNGVVYESTNNSDFWTAVVAIEPHVNPVDRQYTIFGESKQFNVSNDSNKWKFLEMFRSSSQNEFYNRRTLTSDTRFVGILKYGGRVWTFHGETPRATTDSSSTANLNNISITIHSEFYIIPRSQESKCNEYINNGL

SEQ ID NO: 118 - RNA, 2328 nt, Artificial Sequence
  derived and/or modified CDS sequence (wt) from RVA/BE1058/P[4]__AEX30665.1__VP4
auggcuucgcucauuuauagacaacuucucacuaacucauauucgguagacuugcaugacgaaauagaacagauuggaucggagaaaacucaaaaugugacaguaaauccagguccauuugcacagacuagauaugcuccagucaauuggggacacggagagauuaaugauucaacuacaguggaaccaguuuuagaugguccuuaucaaccaacuacauuuaaaccacccaaugauuauuggcugcuuauuaguucgaauacagauggaguagucuaugagaguacaaauaauagugacuuuuggacagcggucauugcugucgaaccacaugucaaucaaacaaauagacaauauguuuuauuuggugagaauaagcaguuuaacauagaaaauaguucagauaaauggaaauuuuucgagauguuuaaagguaauagucagagugauuuuucuaauagacggacuuuaaccucuagcaauagacuuguaggaaugcuaaaguaugguggaagaguauggacguuucauggugaaacaccaagagcuacuacugauaguucgaguacugcggauuuaaauaauauaucaauuauaauucauucagaguuuuauauuauuccaagaucccaagaaucuaaauguaaugaauauaucaauaaugguuuaccaccaauucaaaauacuagaaauguaguuccauuaucucuaucauccaggucuauucaauauagaagagcgcaaguuaaugaagauauuacaauuucaaaaacuucauuauggaaggaaaugcaauauaauagagauauuauaauaagauuuaaauuugguaacagugucauaaaauuaggaggauugggauauaaauggucugaaauaucauauaaagcagcgaauuaucaauauagcuauucgcgugauggugaacaaguuacugcacauaccacuuguucaguaaauggaguaaauaauuuuagcuauaauggagguucacuaccuacugauuucaguauuucgagauaugagguuauuaaagaaaauucuuauguauauauagauuacugggaugauucaaaagcauuuagaaauaugguauauguuagaucauuagcagcgaauuugaauucagugaaaugugcaggugggaguuaugauuuuagauuaccuguaggugaauggccuauuaugaauggcggugcuguaucauuacauuuugcuggaguuacauuaucuacacaguucacugauuuuguaucauugaauucgcuacgauuuagauucaguuuaacaguagaugaaccaucuuucucaauaauacgaacacguacaaugaacuuauauggauuaccagcagcuaauccaaauaauggaaaugaguacuaugaagugucaggaagguucucacuuauuucuuuaguuccaaccaaugaugauuaucaaacuccaauuaugaauucaguaacaguaaggcaagauuuagaacgccaacuuaaugauuuacgagaagaguuuaauucauugucacaagaaauagcuaugucacaauugauugauuuagcauuauuaccuuuagauauguuuucuauguuuucagggauaaaaaguacuauugaucugaccaagucaauggcaacuaguguaaugaaaaaauuuagaaaaucaaaauuagcuacaucaauuucagaaaugacuaauucauugucagaugcggcuucgucagcaucaagaagugcuucuauuagaucaaauuuaucggcgauuucaaauuggucugaugcuucaaaaaguguauuaaauguaacugacucauuaaaugauguuucaacacaaacaucuacaauuaguaaaaaacuuagauugaaagagaugauuacucaaacugaaggaauuaauuuugacgauauuucagcagccguauugaaaacgaaaauggauauguccacacaaauuggaaaaaauaccuuaccugauauaguuacugaagcaucugaaaaguucauuccaaaacgaucauaucgaguauuaaaagaugaugaagugauggaaguuaauacugaaggaaaguuuuuugcuuauaaaguggauacacuuaaugagaucccauuugauauaaauaaauucgcugaacuuguaacggauucuccaguuauaucagcgauaauagauuuuaaaacgcuaaaaaauuuaaacgauaauuauggaauuacccgcauagaagcgcuugauuuaauuaaaucgaauccgaauguacuacguaauuuuauuaaucaaaauaauccaauuauaagaaauagaauugagcaguuaauucuacaauguaaauuguga

SEQ ID NO: 119 - RNA, 2328 nt, Artificial Sequence
  derived and/or modified CDS sequence (wt) from RVA/DS-1/P[4]__CAD62680.1__VP4
auggcuucacucauuuauagacaacuucucacuaauucauauucgguagacuuacaugaugaaauagaacagauuggaucggagaaaacucaaaguguaacaguaaauccagguccauuugcacaaaccagauacgcuccaguuaauuggggaucaugggagauuaaugauucaacuacaguugaaccaguuuuagaugguccuuaucaacccacuacauucaaaccacccaaugauuauugguugcuuauuaguucaaauacaaauggaguagucuacgaaaguacaaauaauaaugacuuuuggacugcaguaucaucaguugaaccacauguuagucaaacaaauaggcaauauauuuuauuuggggaaaauaagcaguucaacguagaaaacaauucagauaaauggaaauuuuucgaaacguuuacagguaguagucaggguaauuuuucuaauagacggacucuaacuucuaguaauagacuuguagggaugcuaaaauaugguggaagaguauggacauuucauggugaaacaccaagagcuacuacugauaguucaaauacugcggauuuaaauaauauaucaauuauaauucauucagaguuuuauauuauuccaagaucccaagaaucuaaauguaacgaguauaucaauaaugguuuaccaccaauucagaauacuagaaauguaguuccauugucauuaucauccagaucgauucaauauaagagagcacaaguuaaugaagauauuacaauuucaaaaacuucauuauggaaggaaaugcaauauaauagagauauuauaauaagauuuaaauuugguaauaguauuauaaaacuagguggauugggauauaaauggucugaaauaucauauaaagcagcgaauuaucaguauaguuauucacgugauggugaacaaguuacugcacauaccacuuguucaguaaauggaguaaacaauuuuagcuauaauggaggcucacuaccuacugauuucaguauuucgagguaugaaguuauuaaagaaaauucuuauguguacauagacuacugggaugauucaaaagcauuuagaaauaugguguauguuagaucgcuagcagcaaauuuaaauucagugaaauguacaggugggaguuauaauuuuagauugcccguagguaaauggccuauuauggaugguggugcuguaucauuacauuuugcuggaguuacauuaucuacacaguucacugauuuuguaucauuaaauucacugcgauuuagauucaguuuaacaguagaugaaccaucuuucucaauaauacgaacacguacaauaaacuuguacggauuaccagcagcuaauccaaacaauggaaaugaauacuaugaaaugucaggaagguuuucacuuauuucuuuaguucaaaccaaugaugauuaucaaacuccaauuaugaauucaguaacaguaaggcaggauuuagaacgccagcuuaaugauuugcgagaagaguuuaauucauugucacaagaaauagcuaugucacaauuaauugauuuagcauuacuaccuuuagauauguucucuauguuuucgggaauaaaaagcacaauugaucuaaccaaaucaauggcaacuaguguaaugaaaaaauuuagaaaaucgaaauuagcuacaucaauuucagaaaugacuaauucauugucagaugcggcuucaucagcaucaagaagugcuucuauuagaucaaauuuaucuacgauuucaaauuggacuaauacuucaaaaaguguuucaaauguaacugacucaguaaaugauguuucaacacaaacaucuacaauuaguaagaaacuuagauuaagagagaugauuacucaaacugaaggauugaguuuugaugauauuucagcagcuguacugaaaacgaaaauagauauguccacacaaauuggaaaaaacacuuuaccugauauaguuacugaagcgucugaaaaauuuauuccaaaacgaucauaucgaguauuaaaagaugaugaaguaauggaaauuaauacugaaggaaaguuuuuugcauauaaaguggauacacucaaugagauaccauuugauauaaauaaauucgccgaacuugucacggauucuccaguuauaucagcaauaauagacuuuaagacguuaaaaaauuuaaacgacaauuauggaauuacucguauugaagcguuuaauuuaauuaaaucgaauccaaaugugcuacguaauuucauuaaucaaaauaauccaauuauaagaaauagaauugagcaguuaauucuacaauguaaguuguga

SEQ ID NO: 120 - RNA, 2328 nt, Artificial Sequence; identical to SEQ ID NO: 119
  derived and/or modified CDS sequence (wt) from RVA/DS-1/P[4]__ABV53252.1__VP4

SEQ ID NO: 121 - RNA, 2328 nt, Artificial Sequence
  derived and/or modified CDS sequence (wt) from RVA/F01322/P[6]__AFA51886.1__VP4
auggcuucgcucauuuauagacagcuacucacuaauucauacacaguagaauuaucagaugaaaucaauacaauuggaucagaaaaaaaucagaauguaacgauuaaucccggaccguuugcucaaacaaauuaugcaccagugacuuggagucauggggaagugaaugauucgacaacaauagagccaguacucgaugguccuuaucaaccaacaaauuuuaagccaccaaacgauuacuggauauuauugaauccaacuaaucaacaaguuguauuagaagguaccaauaaaacugauaucuggguugcuuuauuacuuguugaaccaaacguaaccaaucaaaguagacaauacacauuauuuggagaaacgaaacaaauuacuguagaaaauaacacaaacaaauggaaauucuucgaaauguucagaaguaguguuagugcugaauuucaacauaagcgcacuuuaacaucagacacuaaauuagcuggguuuaugaaauuuuauaauaguguuuggacuuuucauggugaaacgccgaaugcuacaacugauuacucgucaacuucaaauuuauuugaaguagaaacuguaauacauguugaguuuuauauaauaccaagaucgcaagaaucuaaguguagugaauauauaaauacuggguuaccaccaaugcagaauacaaggaauauaguuccaguugcguuaucaucuagaucgguaacuuaucaacgugcucagguuaaugaagauaucauuauaucaaagacgucguuguggaaggaaaugcaauauaacagagacaucauaauaagguuuaaauuuaauaauaguauaguaaaacucggugggcuagguuauaaauggucagaaauuucguuuaaagcagcuaauuaucaguacaauuauuugcgagauggagagcaaguuacggcacauacuacuuguucagucaauggugugaauaacuucaguuauaauggaggaucacugccaacugauuuuaguguaucaagauaugaagugauuaaagagaauucuuaugucuauguugauuauugggaugacucacaagcauuuaggaacaugguauauguuagaucauuagcagcaaauuuaaauucaguaaaguguagcggaggaaauuauaauuuucaaaucccaguuggugcauggccagugaugaguggaggugcagugucuuuacauuucgcaggagucacuuuauccacucaauuuacugacuucguaucacuuaauucguuaagauuuagauucaguuuaaccguugaagagccaccauuuucaauuuuacgcacacgugugucaggauuguacggacuaccagcauucgauccgaauaacggacaugaauauuaugaaauaaaugggagauuuucucuuauuucauuagugccaucuaaugacgauuaucaaacuccaaucaugaauucaguuacagugcgacaagaucuugaacgccaacuaggugauuuaagggaggaauucaauucucuaucacaagaaauagcaaugacgcaauugauagauuuagcauuauuaccauuagauauguuuucuauguucucagguauuaaaagcacaauugacgcagcuaaaucaauggccacaaaggugaugaaaaaguuuaagaaaucaggauuagcuacaucaaucucugaauugacuggaucauuaucaaacgccgccucaucaguuuccagaaauucaucuauuagaucuaacauaucauccauaucaguguggacggauguuuccgaacaaauagcggguacgucagacuccgucagaaacauuuccacgcaaacgucagcuauuaguaaaaaauugcgacuacgcgaaauuacuacacaaacugaagguaugaauuuugaugauauuucagcggcaguccuuaaaacuaagauagacaaaucaacucauauaagcccagauacauuaccagacauaauaacugagucaucugaaaaguuuauaccaaaacgagcuuauagaguucuaaaagaugaugaagugauggaagcugauguggaugggaaguucuuugcauauaaaguugacacuuuugaagaaguaccauucgacguagauaaauuuguugauuugguaacugauucuccuguaauuucagcuauaauugauuuuaagacguugaagaauuuaaacgacaauuaugguauaacgcgaucucaagcguuggacuuaaucagauccgaucccagaguuuuacgcgauuuuaucaaccagaauaauccaauuauuaaaaauagaauugaacagcuaauacugcaauguagacuguga

SEQ ID NO: 122 - RNA, 2328 nt, Artificial Sequence
  derived and/or modified CDS sequence (wt) from RVA/1076/P[6]__AAA47337.1__VP4
auggcuucgcucauuuauagacagcuacucacuaauucauacacaguugaauuaucagaugaaauuaauacgauuggaucagaaaaaagucaaaauguaacgauuaaucccggaccguuugcucaaacaaauuaugcaccagugacuuggagucauggggaagugaaugauucgacaacaauagagccaguacucgaugguccuuaucaaccaacaaguuuuaagccaccaagcgauuacuggauauuauugaauccaacuaaucaacaaguuguauuagaggguaccaauaaaacugauauuuggguugcuuuauuacuuguugaaccaaacguaaccaaucaaaguagacaauacacauuauuuggagaaacgaaacaaauuacuguagaaaauaacacaaacaaauggaaauucuucgaaauguucagaagcaguguuagugccgaauuucaacauaagcgcacuuuaacaucagacacuaaauuagcuggauuuuuaaaauuuuauaauaguguuuggacuuucuacggugaaacgccacaugcuacaacugauuacucaucaacuucaaauuuaucugaaguagaaacugcaauacauguugaguuuuauauaauaccaagaucgcaagaaucuaaguguaaugaauauauaaauacuggguuaccaccaaugcagaauacaaggaauauaguuccaguugcacuaucaucuagaucagugacuuaucaacgugcucagguuaaugaagauauuaucauaucaaagacgucguuauggaaggaaaugcaauauaacagagacaucauaauaagguuuaaauuuaauaauaguauaguaaaacuagguggacuagguuauaaauggccagaaauuucguuuaaagcugcuaauuaucaguacaauuacuuacgagauggagaacaaguuauggcacauacuacuuguucagucaauggugagaauaacuacaguuauaauggaggauuacugccaacucauuuuaguguaucaagauaugaagugauuaaggagaauucuuaugucuaugauaauuauugggaugacucacaagcauuuaggaacaugguauacgucaggucauuggcagcaaauuuaaauucaguaaaguguagugguggaaauuauaauuuucaaaugccaguuggugcguggccagugaugaguggaggugcagugucuuugcauuuugcaggagucacuuuauccacugaauuuacugacuuugugucacuuaauucguuaagauuuagauucaguuuaaccguugaagagccaccuuuuucaauuuuacgcacacgugugucaggauuguacgggcuaccagcauucaauccgaauaacggacaugaauauuaugaaauagcugggagauuuucuuuuauuuuguuagugccgucuaaugacgauuaucaaacuccaaucaugaauucaguuacgguacgacaagaucuugaacgucaacuaggagauuuaagggaggaauucaauucucuaucucaagaaauagcaaugacgcaauugauagauuuagcauuauuaccguuagauauguuuucuauguucucagguauuaaaaguaccauugacgcagcuaaaucaauggcuacaauggugaugaaaaaguuuaagaaaucgggauuagcuacaucaaucucugaauugacuagaucauuaucaaacgcugcuucaucaguuuccagaaguucaucuauuaaaucuaacauaucauccauuucaguguggacggauguuuccgaacaaauaacggguucgucagacucagucaggaauauuuccacgcaaacgucagcuauuaguaaaagauugcgacuacgcgaaauuacuacacaaacagaagguaugaauuuuauugauauuucagcggcaguucuuaaaacuaagauagauaaaucaacucauauaagcccagauacauuaccagacauaauaacugagucaucugaaaaauuuuuaccaaaacgagcuuauagaguccuaaaagaugaugaaguaauggaaguugauguggaugggaaguucuuugcauauaaaguugacacuuuugaagaaguaccauuugacguagauaaauuuguugauuugguaacugauucuccuguaauuucagcuauaauugauuuuaagacguugaagaauuuaaacgacaauuaugguauaacgcgaucucaagcguuagacuuaauuagaucugaucccagaguuuuacgcgauuuuaucaaucagaauaauccaauuauuaaaaauagaauugaacagcuaauacugcaauguagacuguga

SEQ ID NO: 123 - RNA, 2328 nt, Artificial Sequence
  derived and/or modified CDS sequence (wt) from RVA/BE1128/P[8]__AEX30671.1__VP4
auggcuucgcucauuuauagacagcuucucacuaauucauauucaguagauuuacaugaugaaauagaacaaauuggaucagaaaaaacucaaaauguaacuguaaauccagguccauuugcucaaacgagauaugcuccaguuaauuggggucauggagaaauaaaugauucaacgacaguggaaccaauuuuagaugguccuuaucaaccuacuacauuuacaccaccuacugauuauuggauacuuauuaccucaaauacaaauggaguaguauacgagaguacaaauaauagugacuuuuggacugcagucauugcuguagaaccgcacgucaauccaguagauagacaauauaauguauuuggugaaaauaaacaauuuaauguaagaaaugauucagauaaauggaaguuuuuagaaauguuuagaggcaguagucaaaaugacuuuuauaauagacguacacuaacuucugauacuagacucguaggaauauuaaaauaugguggaagaguauggacauuucauggugaaacaccgagggcuaccacugauaguucaaacacugcaaauuuggacgguauaucaauuacaauucauucagaauuuuauauuauuccaaggucccaagagucuaaguguaaugaauauauuaacaacggucugccuccaauucaaaauacuagaaauguaguaccauuaucauuaucaucuagaucuauacaguauaagagagcacaaguuaaugaagacauuacaauuucaaagaccucauuauggaaagaaaugcaauauaacagagauauuauaauuagauuuaaauuugguaauaguauuguuaaacuagggggacuagguuauaaaugguccgaaauaucauauaaagcagcaaacuaucaauauaauuaucuacgugauggcgaacaaguaacugcacauacuacuugcucagugaauggaguaaauaauuuuagcuauaacggaggaucuuuaccuacugauuuuagcguuucaagguaugaaguuauuaaagaaaauuccuauguauauguagauuauugggaugauucaaaagcauuucgaaauaugguguauguuagaucauuagcagcuaauuuaaauucagugaaauguacagguggaaguuacgacuuuaguauaccugugggugcauggccaguuaugaauggaggugcuguuucguugcauuuugcugguguuacauuaucuacgcaauucacagauuucguaucauuaaauucauuacgguuuagauuuaguuugacaguggaugaaccaucuuuuucaauauugagaacacguacgguaaauuuauacggauuaccagcugcuaauccaaauaauggaaaugaauauuacgaaauaucaggaagguuuucacuuauuucuuuaguuccaacuaacgaugauuaucagacuccaauuaugaauucaguaacaguaagacaagauuuagaacgucaacuuacugauuuacgagaggaauucaauucauuaucacaagaaauagcuaugucacaauuaauugauuuagcgcuauuaccuuuagauauguuuucuauguuuucaggaauuaaaagcacaauugaucuaacuaaaucaauggcaacuaguguaaugaaaaaauuuagaaaaucaaaguuagcuacaucaguuucagaaaugacuaauucauugucagacgcagcaucaucagcaucaagaagcguuucuguuagaucaaauauauccgcaguuucaaacuggacuaacguuucaaaugaugugucaaaugugacuaauucaguaaaugauauuucgacacaaacgucuacgaucaguaaaaaccuuagauuaaaggagaugauuacucaaacugaaggaaugaguuuugacgauauuucagcagcaguacuaaaaacaaaaauagauaugucuacucaaauugggaaaaacacuuuaccugacauagucacagaggcaucugagaaauuuauuccaaaacgaucauaucgaauauuaaaagaugaugaaguaauggaaauuaauacugaaggaaaauucuuugcauauaaaauugauacacuuaacgaagugccauuugauguaaauaaauuuacugaacuuguaacaaauucuccaguuauaucagcgauaaucgauuuuaaaacauuaaaaaauuuaaaugauaauuauggaauuacucgaacugaagcguuaaauuuaauuaaaucaaauccaaauguauuacguaauuuuauuaaucaaaauaauccaauuauaaggaauagaauugaacaguuaauucuacaauguaaguuguga

SEQ ID NO: 124 - RNA, 2328 nt, Artificial Sequence
  derived and/or modified CDS sequence (wt) from RVA/Wa-VirWa/P[8]__ACR22783.1__VP4
auggcuucgcucauuuauagacagcuucucacuaauucauauucaguagauuuacaugaugaaauagagcaaauuggaucagaaaaaacucaaaauguaacuauaaauccgaguccauuugcacagacuagauaugcuccagucaauuggggucauggagagauaaaugauucgacuacaguagaaccaauuuuagaugguccuuaucagccaacuacauuuacuccaccuaaugauuauuggauacuuauuaauucaaauacaaauggaguaguauaugaaaguacaaauaauagugacuuuuggacugcagucguugcuauugaaccgcacguuaacccaguagauagacaauauacgauauuuggugaaaguaagcaauuuaaugugcguaacgauucaaauaaauggaaguuuuuagaaauguuuagaagcaguagucaaaaugaauuuuauaauagacguacauuaacuucugauacuagacuuguaggaauauugaaauaugguggaagaguauggacauuucauggugaaacaccaagagcuacuacugacaguucaaguacugcaaauuuaaauaauauaucaauuacaauucauucagaauuuuacauuauuccaaggucccaagaaucuaaauguaaugaauauauuaauaauggucugccaccaauucaaaauacuagaaauguaguuccauugccauuaucaucuagaucgauacaguauaagagagcacaaguuaaugaagacauuauaguuucaaaaacuucauuauggaaagaaaugcaguauaauagggauauuauaauuagauuuaaauuugguaauaguauuguaaaaaugggaggacuagguuauaaauggucugaaauaucauauaaggcagcaaauuaucaauauaauuacuuacgugacggugaacaaguaaccgcacacaccacuuguucaguaaauggagugaacaauuuuagcuauaauggagggucucuacccacugauuuugguauuucaagguaugaaguuauuaaagagaauuccuauguauauguagacuauugggaugauucaaaagcauuuagaaauaugguauauguuagaucauuagcagcuaauuugaauucagugaaauguacagguggaaguuaugauuuuaguauaccaguaggugcauggccaguaaugaaugguggcgcuguuucguugcauuuugccggaguuacauuauccacgcaauuuacugauuuuguaucauugaauucacuacgauuuagauuuaguuugacaguugaugaaccaccuuucucaauauugagaacacguacagugaauuuguacggauuaccagccgcuaauccaaauaauggaaaugaauacuacgaaauaucaggaagguuuucacucauuucuuuaguuccaacuaaugaugauuaucagacuccaauuaugaauucagugacaguaagacaagauuuagagcgccaacuuacugauuugcgagaagaauuuaacucauugucacaagaaauagcuauggcacaauugauugauuuagcacuguugccucuagauauguuuuccauguuuucaggaauuaaaaguacaauugauuuaacuaaaucaauggcgacuaguguaaugaagaaauuuagaaaaucaaaauuagcuacaucaauuucagaaaugacuaauucauugucagaugcugcuucaucagcaucaagaaacguuucuauuagaucgaauuuaucugcgauuucaaauuggacuaauguuucaaaugaugugucaaacguaacuaauucauugaacgauauuucaacacaaacgucuacaauuaguaagaaacuuagauuaaaagaaaugauuacucaaacugaaggaaugagcuuugacgacauuucagcagcuguacuaaaaacaaaaauagauaugucuacucaaauuggaaaaaauacuuuaccugacauaguuacagaggcaucugagaaauuuauuccaaaacgaucauaucgaauauuaaaggaugaugaaguaauggaaauuaauacugaaggaaaauucuuugcauacaaaauuaauacauuugaugaagugccauucgauguaaauaaauucgcugaacuaguaacagauucuccaguuauaucagcgauaaucgauuuuaagacauugaaaaauuuaaaugauaauuauggaaucacucguacagaagcguuaaauuuaauuaaaucgaauccaaauauguugcguaauuucauuaaucaaaauaauccaauuauaaggaauagaauugaacaguuaauacuacaauguaaauuguga

SEQ ID NO: 125 - RNA, 2328 nt, Artificial Sequence
  derived and/or modified CDS sequence (wt) from RVA/Wa/P[8]__AAA47290.1__VP4
auggcuucgcucauuuauagacagcuucucacuaauucauauucaguagauuuacaugaugaaauagagcaaauuggaucagaaaaaacucaaaauguaacuauaaauccgaguccauuugcacagacuagauaugcuccagucaauuggggucauggagagauaaaugauucgacuacaguagaaccaauuuuagaugguccuuaucagccaacuacauuuacuccaccuaaugauuauuggauacuuauuaauucaaauacaaauggaguaguauaugaaaguacaaauaauagugacuuuuggacugcagucguugcuauugaaccgcacguuaacccaguagauagacaauauacgauauuuggugaaaguaagcaauuuaaugugaguaacgauucaaauaaauggaaguuuuuagaaauguuuagaagcaguagucaaaaugaauuuuauaauagacguacauuaacuucugauacuagauuuguaggaauauugaaauaugguggaagaguauggacauuucauggugaaacaccaagagcuacuacugacaguucaaguacugcaaauuuaaauaauauaucaauuacaauucauucagaauuuuacauuauuccaaggucccaagaaucuaaauguaaugaauauauuaauaauggucugccaccaauucaaaauacuagaaauguaguuccauugccauuaucaucuagaucgauacaguauaagagagcacaaguuaaugaagacauuauaguuucaaaaacuucauuauggaaagaaaugcaguauaauagggauauuauaauuagauuuaaauuugguaauaguauuguaaaaaugggaggacuagguuauaaauggucugaaauaucauauaaggcagcaaauuaucaauauaauuacuuacgugacggugaacaaguaaccgcacacaccacuuguucaguaaauggagugaacaauuuuagcuauaauggagggucucuacccacugauuuugguauuucaagguaugaaguuauuaaagagaauuccuauguauauguagacuauugggaugauucaaaagcauuuagaaauaugguauauguuagaucauuagcagcuaauuugaauucagugaaauguacagguggaaguuauaauuuuaguuuaccaguaggugcauggccaguaaugaaugguggcgcuguuucguugcauuuugccggaguuacauuauccacgcaauuuacugauuuuguaucauugaauucacuacgauuuagauuuaguuugacaguugaugaaccaccuuucucaauauugagaacacguacagugaauuuguacggauuaccagccgcuaauccaaauaauggaaaugaauacuacgaaauaucaggaagguuuucacucauuuauuuaguuccaacuaaugaugauuaucagacuccaauuaugaauucagugacaguaagacaagauuuagagcgccaacuuacugauuugcgagaagaauuuaacucauugucacaagaaauagcuauggcacaauugauugauuuagcacuguugccucuagguauguuuuccauguuuucaggaauuaaaaguacaauugauuuaacuaaaucaauggcgacuaguguaaugaagaaauuuagaaaaucaaaauuagcuacaucaauuucagaaaugacuaauucauugucagaugcugcuucaucagcaucaagaaacguuucuauuagaucgaauuuaucugcgaucucaaauuggacuaauguuucaaaugaugugucaaacguaacuaauucauugaacgauauuucaacacaaacgucuacaauuaguaagaaauuuagauuaaaagaaaugauuacucaaacugaaggaaugagcuuugacgacauuucagcagcuguacuaaaaacaaaaauagauaugucuacucaaauuggaaaaaauacuuuaccugacauaguuacagaggcaucugagaaauuuauuccaaaacgaucauaucgaauauuaaaggaugaugaaguaauggaaauuaauacugaaggaaaauucuuugcauacaaaauuaauacauuugaugaagugccauucgauguaaauaaauucgcugaacuaguaacagauucuccaguuauaucagcgauaaucgauuuuaagacauugaaaaauuuaaaugauaauuauggaaucacucguacagaagcguuaaauuuaauuaaaucgaauccaaauauguugcguaauuucauuaaucaaaauaauccaauuauaaggaauagaauugaacaguuaauacuacaauguaaauuguga

SEQ ID NO: 126 - RNA, 2328 nt, Artificial Sequence
  derived and/or modified CDS sequence (wt) from RVA/Wa/P[8]__AAA66953.1__VP4
auggcuucacucauuuauagacagcuucucacuaauucauauucaguagauuuacaugaugaaauagagcaaauuggaucagaaaaaacucaaaauguaacuauaaauccgaguccauuugcacagacuagauaugcuccagucaauuggggucauggagagauaaaugauucgacuacaguagaaccaauguuagaugguccuuaucagccaacuacauuuacuccaccuaaugauuauuggauacuuauuaauucaaauacaaauggaguaguauaugaaaguacaaauaauagugacuuuuggacugcagucguugcuauugaaccgcacguuaacccaguagauagacaauauacgauauuuggugaaaguaagcaauuuaaugugaguaacgauucaaauaaauggaaguuuuuagaaauguuuagaagcaguagucaaaaugaauuuuauaauagacguacauuaacuucugauacuagauuuguaggaauauugaaauaugguggaagaguauggacauuucauggugaaacaccaagagcuacuacugacaguucaaguacugcaaauuuaaauaauauaucaauuacaauucauucagaauuuuacauuauuccaaggucccaagaaucuaaauguaaugaauauauuaauaauggucugccaccaauucaaaauacuagaaauguaguuccauugccauuaucaucuagaucgauacaguauaagagagcacaaguuaaugaagacauuauaguuucaaaaacuucauuauggaaagaaaugcaguauaauagggauauuauaauuagauuuaaauuugguaauaguauuguaaaaaugggaggacuagguuauaaauggucugaaauaucauauaaggcagcaaauuaucaauauaauuacuuacgugacggugaacaaguaaccgcacacaccacuuguucaguaaauggagugaacaauuuuagcuauaauggaggguuucuacccacugauuuugguauuucaagguaugaaguuauuaaagagaauuccuauguauauguagacuauugggaugauucaaaagcauuuagaaauaugguauauguuagaucauuagcagcuaauuugaauucagugaaauguacagguggaaguuauaauuuuaguauaccaguaggugcauggccaguaaugaaugguggcgcuguuucguugcauuuugccggaguuacauuauccacgcaauuuacugauuuuguaucauugaauucacuacgauuuagauuuaguuugacaguugaugaaccaccuuucucaauauugagaacacguacagugaauuuguacggauuaccagccgcuaauccaaauaauggaaaugaauacuacgaaauaucaggaagguuuucacucauuuauuuaguuccaacuaaugaugauuaucagacuccaauuaugaauucagugacaguaagacaagauuuagagcgccaacuuacugauuugcgagaagaauuuaacucauugucacaagaaauagcuauggcacaauugauugauuuagcacuguugccucuagauauguuuuccauguuuucaggaauuaaaaguacaauugauuuaacuaaaucaauggcgacuaguguaaugaagaaauuuagaaaaucaaaauuagcuacaucaauuucagaaaugacuaauucauugucagaugcugcuucaucagcaucaagaaacguuucuauuagaucgaauuuaucugcgaucucaaauuggacuaauguuucaaaugaugugucaaacguaacuaauucauugaacgauauuucaacacaaacgucuacaauuaguaagaaauuuagauuaaaagaaaugauuacucaaacugaaggaaugagcuuugacgacauuucagcagcuguacuaaaaacaaaaauagauaugucuacucaaauuggaaaaaauacuuuaccugacauaguuacagaggcaucugagaaauuuauuccaaaacgaucauaucgaauauuaaaggaugaugaaguaauggaaauuaauacugaaggaaaauucuuugcauacaaaauuaauacauuugaugaagugccauucgauguaaauaaauucgcugaacuaguaacagauucuccaguuauaucagcgauaaucgauuuuaagacauugaaaaauuuaaaugauaauuauggaaucacucguacagaagcguuaaauuuaauuaaaucgaauccaaauauguugcguaauuucauuaaucaaaauaauccaauuauaaggaauagaauugaacaguuaauacuacaauguaaauuguga

SEQ ID NO: 127 - RNA, 720 nt, Artificial Sequence
  derived and/or modified CDS sequence (wt) from RVA/BE1058/P[4]__AEX30665.1__VP8*
auggcuucgcucauuuauagacaacuucucacuaacucauauucgguagacuugcaugacgaaauagaacagauuggaucggagaaaacucaaaaugugacaguaaauccagguccauuugcacagacuagauaugcuccagucaauuggggacacggagagauuaaugauucaacuacaguggaaccaguuuuagaugguccuuaucaaccaacuacauuuaaaccacccaaugauuauuggcugcuuauuaguucgaauacagauggaguagucuaugagaguacaaauaauagugacuuuuggacagcggucauugcugucgaaccacaugucaaucaaacaaauagacaauauguuuuauuuggugagaauaagcaguuuaacauagaaaauaguucagauaaauggaaauuuuucgagauguuuaaagguaauagucagagugauuuuucuaauagacggacuuuaaccucuagcaauagacuuguaggaaugcuaaaguaugguggaagaguauggacguuucauggugaaacaccaagagcuacuacugauaguucgaguacugcggauuuaaauaauauaucaauuauaauucauucagaguuuuauauuauuccaagaucccaagaaucuaaauguaaugaauauaucaauaaugguuuaccaccaauucaaaauacuagaaauguaguuccauuaucucuaucauccagg

SEQ ID NO: 128 - RNA, 720 nt, Artificial Sequence
  derived and/or modified CDS sequence (wt) from RVA/DS-1/P[4]__CAD62680.1__VP8*
auggcuucacucauuuauagacaacuucucacuaauucauauucgguagacuuacaugaugaaauagaacagauuggaucggagaaaacucaaaguguaacaguaaauccagguccauuugcacaaaccagauacgcuccaguuaauuggggaucaugggagauuaaugauucaacuacaguugaaccaguuuuagaugguccuuaucaacccacuacauucaaaccacccaaugauuauugguugcuuauuaguucaaauacaaauggaguagucuacgaaaguacaaauaauaaugacuuuuggacugcaguaucaucaguugaaccacauguuagucaaacaaauaggcaauauauuuuauuuggggaaaauaagcaguucaacguagaaaacaauucagauaaauggaaauuuuucgaaacguuuacagguaguagucaggguaauuuuucuaauagacggacucuaacuucuaguaauagacuuguagggaugcuaaaauaugguggaagaguauggacauuucauggugaaacaccaagagcuacuacugauaguucaaauacugcggauuuaaauaauauaucaauuauaauucauucagaguuuuauauuauuccaagaucccaagaaucuaaauguaacgaguauaucaauaaugguuuaccaccaauucagaauacuagaaauguaguuccauugucauuaucauccaga

SEQ ID NO: 129 - RNA, 720 nt, Artificial Sequence; identical to SEQ ID NO: 128
  derived and/or modified CDS sequence (wt) from RVA/DS-1/P[4]__ABV53252.1__VP8*

SEQ ID NO: 130 - RNA, 720 nt, Artificial Sequence
  derived and/or modified CDS sequence (wt) from RVA/F01322/P[6]__AFA51886.1__VP8*
auggcuucgcucauuuauagacagcuacucacuaauucauacacaguagaauuaucagaugaaaucaauacaauuggaucagaaaaaaaucagaauguaacgauuaaucccggaccguuugcucaaacaaauuaugcaccagugacuuggagucauggggaagugaaugauucgacaacaauagagccaguacucgaugguccuuaucaaccaacaaauuuuaagccaccaaacgauuacuggauauuauugaauccaacuaaucaacaaguuguauuagaagguaccaauaaaacugauaucuggguugcuuuauuacuuguugaaccaaacguaaccaaucaaaguagacaauacacauuauuuggagaaacgaaacaaauuacuguagaaaauaacacaaacaaauggaaauucuucgaaauguucagaaguaguguuagugcugaauuucaacauaagcgcacuuuaacaucagacacuaaauuagcuggguuuaugaaauuuuauaauaguguuuggacuuuucauggugaaacgccgaaugcuacaacugauuacucgucaacuucaaauuuauuugaaguagaaacuguaauacauguugaguuuuauauaauaccaagaucgcaagaaucuaaguguagugaauauauaaauacuggguuaccaccaaugcagaauacaaggaauauaguuccaguugcguuaucaucuaga

SEQ ID NO: 131 - RNA, 720 nt, Artificial Sequence
  derived and/or modified CDS sequence (wt) from RVA/1076/P[6]__AAA47337.1__VP8*
auggcuucgcucauuuauagacagcuacucacuaauucauacacaguugaauuaucagaugaaauuaauacgauuggaucagaaaaaagucaaaauguaacgauuaaucccggaccguuugcucaaacaaauuaugcaccagugacuuggagucauggggaagugaaugauucgacaacaauagagccaguacucgaugguccuuaucaaccaacaaguuuuaagccaccaagcgauuacuggauauuauugaauccaacuaaucaacaaguuguauuagaggguaccaauaaaacugauauuuggguugcuuuauuacuuguugaaccaaacguaaccaaucaaaguagacaauacacauuauuuggagaaacgaaacaaauuacuguagaaaauaacacaaacaaauggaaauucuucgaaauguucagaagcaguguuagugccgaauuucaacauaagcgcacuuuaacaucagacacuaaauuagcuggauuuuuaaaauuuuauaauaguguuuggacuuucuacggugaaacgccacaugcuacaacugauuacucaucaacuucaaauuuaucugaaguagaaacugcaauacauguugaguuuuauauaauaccaagaucgcaagaaucuaaguguaaugaauauauaaauacuggguuaccaccaaugcagaauacaaggaauauaguuccaguugcacuaucaucuaga

SEQ ID NO: 132 - RNA, 720 nt, Artificial Sequence
  derived and/or modified CDS sequence (wt) from RVA/BE1128/P[8]__AEX30671.1__VP8*
auggcuucgcucauuuauagacagcuucucacuaauucauauucaguagauuuacaugaugaaauagaacaaauuggaucagaaaaaacucaaaauguaacuguaaauccagguccauuugcucaaacgagauaugcuccaguuaauuggggucauggagaaauaaaugauucaacgacaguggaaccaauuuuagaugguccuuaucaaccuacuacauuuacaccaccuacugauuauuggauacuuauuaccucaaauacaaauggaguaguauacgagaguacaaauaauagugacuuuuggacugcagucauugcuguagaaccgcacgucaauccaguagauagacaauauaauguauuuggugaaaauaaacaauuuaauguaagaaaugauucagauaaauggaaguuuuuagaaauguuuagaggcaguagucaaaaugacuuuuauaauagacguacacuaacuucugauacuagacucguaggaauauuaaaauaugguggaagaguauggacauuucauggugaaacaccgagggcuaccacugauaguucaaacacugcaaauuuggacgguauaucaauuacaauucauucagaauuuuauauuauuccaaggucccaagagucuaaguguaaugaauauauuaacaacggucugccuccaauucaaaauacuagaaauguaguaccauuaucauuaucaucuaga

SEQ ID NO: 133 - RNA, 720 nt, Artificial Sequence
  derived and/or modified CDS sequence (wt) from RVA/Wa-VirWa/P[8]__ACR22783.1__VP8*
auggcuucgcucauuuauagacagcuucucacuaauucauauucaguagauuuacaugaugaaauagagcaaauuggaucagaaaaaacucaaaauguaacuauaaauccgaguccauuugcacagacuagauaugcuccagucaauuggggucauggagagauaaaugauucgacuacaguagaaccaauuuuagaugguccuuaucagccaacuacauuuacuccaccuaaugauuauuggauacuuauuaauucaaauacaaauggaguaguauaugaaaguacaaauaauagugacuuuuggacugcagucguugcuauugaaccgcacguuaacccaguagauagacaauauacgauauuuggugaaaguaagcaauuuaaugugcguaacgauucaaauaaauggaaguuuuuagaaauguuuagaagcaguagucaaaaugaauuuuauaauagacguacauuaacuucugauacuagacuuguaggaauauugaaauaugguggaagaguauggacauuucauggugaaacaccaagagcuacuacugacaguucaaguacugcaaauuuaaauaauauaucaauuacaauucauucagaauuuuacauuauuccaaggucccaagaaucuaaauguaaugaauauauuaauaauggucugccaccaauucaaaauacuagaaauguaguuccauugccauuaucaucuaga

SEQ ID NO: 134 - RNA, 720 nt, Artificial Sequence
  derived and/or modified CDS sequence (wt) from RVA/Wa/P[8]__AAA47290.1__VP8*
auggcuucgcucauuuauagacagcuucucacuaauucauauucaguagauuuacaugaugaaauagagcaaauuggaucagaaaaaacucaaaauguaacuauaaauccgaguccauuugcacagacuagauaugcuccagucaauuggggucauggagagauaaaugauucgacuacaguagaaccaauuuuagaugguccuuaucagccaacuacauuuacuccaccuaaugauuauuggauacuuauuaauucaaauacaaauggaguaguauaugaaaguacaaauaauagugacuuuuggacugcagucguugcuauugaaccgcacguuaacccaguagauagacaauauacgauauuuggugaaaguaagcaauuuaaugugaguaacgauucaaauaaauggaaguuuuuagaaauguuuagaagcaguagucaaaaugaauuuuauaauagacguacauuaacuucugauacuagauuuguaggaauauugaaauaugguggaagaguauggacauuucauggugaaacaccaagagcuacuacugacaguucaaguacugcaaauuuaaauaauauaucaauuacaauucauucagaauuuuacauuauuccaaggucccaagaaucuaaauguaaugaauauauuaauaauggucugccaccaauucaaaauacuagaaauguaguuccauugccauuaucaucuaga

SEQ ID NO: 135 - RNA, 720 nt, Artificial Sequence
  derived and/or modified CDS sequence (wt) from RVA/Wa/P[8]__AAA66953.1__VP8*
auggcuucacucauuuauagacagcuucucacuaauucauauucaguagauuuacaugaugaaauagagcaaauuggaucagaaaaaacucaaaauguaacuauaaauccgaguccauuugcacagacuagauaugcuccagucaauuggggucauggagagauaaaugauucgacuacaguagaaccaauguuagaugguccuuaucagccaacuacauuuacuccaccuaaugauuauuggauacuuauuaauucaaauacaaauggaguaguauaugaaaguacaaauaauagugacuuuuggacugcagucguugcuauugaaccgcacguuaacccaguagauagacaauauacgauauuuggugaaaguaagcaauuuaaugugaguaacgauucaaauaaauggaaguuuuuagaaauguuuagaagcaguagucaaaaugaauuuuauaauagacguacauuaacuucugauacuagauuuguaggaauauugaaauaugguggaagaguauggacauuucauggugaaacaccaagagcuacuacugacaguucaaguacugcaaauuuaaauaauauaucaauuacaauucauucagaauuuuacauuauuccaaggucccaagaaucuaaauguaaugaauauauuaauaauggucugccaccaauucaaaauacuagaaauguaguuccauugccauuaucaucuaga

SEQ ID NO: 136 - RNA, 477 nt, Artificial Sequence
  derived and/or modified CDS sequence (wt) from RVA/BE1058/P[4]__AEX30665.1__VP8*(65-223)
uuagaugguccuuaucaaccaacuacauuuaaaccacccaaugauuauuggcugcuuauuaguucgaauacagauggaguagucuaugagaguacaaauaauagugacuuuuggacagcggucauugcugucgaaccacaugucaaucaaacaaauagacaauauguuuuauuuggugagaauaagcaguuuaacauagaaaauaguucagauaaauggaaauuuuucgagauguuuaaagguaauagucagagugauuuuucuaauagacggacuuuaaccucuagcaauagacuuguaggaaugcuaaaguaugguggaagaguauggacguuucauggugaaacaccaagagcuacuacugauaguucgaguacugcggauuuaaauaauauaucaauuauaauucauucagaguuuuauauuauuccaagaucccaagaaucuaaauguaaugaauauaucaauaaugguuua

SEQ ID NO: 137 - RNA, 477 nt, Artificial Sequence
  derived and/or modified CDS sequence (wt) from RVA/DS-1/P[4]__CAD62680.1__VP8*(65-223)
uuagaugguccuuaucaacccacuacauucaaaccacccaaugauuauugguugcuuauuaguucaaauacaaauggaguagucuacgaaaguacaaauaauaaugacuuuuggacugcaguaucaucaguugaaccacauguuagucaaacaaauaggcaauauauuuuauuuggggaaaauaagcaguucaacguagaaaacaauucagauaaauggaaauuuuucgaaacguuuacagguaguagucaggguaauuuuucuaauagacggacucuaacuucuaguaauagacuuguagggaugcuaaaauaugguggaagaguauggacauuucauggugaaacaccaagagcuacuacugauaguucaaauacugcggauuuaaauaauauaucaauuauaauucauucagaguuuuauauuauuccaagaucccaagaaucuaaauguaacgaguauaucaauaaugguuua

SEQ ID NO: 138 - RNA, 477 nt, Artificial Sequence; identical to SEQ ID NO: 137
  derived and/or modified CDS sequence (wt) from RVA/DS-1/P[4]__ABV53252.1__VP8*(65-223)

SEQ ID NO: 139 - RNA, 477 nt, Artificial Sequence
  derived and/or modified CDS sequence (wt) from RVA/F01322/P[6]__AFA51886.1__VP8*(65-223)
cucgaugguccuuaucaaccaacaaauuuuaagccaccaaacgauuacuggauauuauugaauccaacuaaucaacaaguuguauuagaagguaccaauaaaacugauaucuggguugcuuuauuacuuguugaaccaaacguaaccaaucaaaguagacaauacacauuauuuggagaaacgaaacaaauuacuguagaaaauaacacaaacaaauggaaauucuucgaaauguucagaaguaguguuagugcugaauuucaacauaagcgcacuuuaacaucagacacuaaauuagcuggguuuaugaaauuuuauaauaguguuuggacuuuucauggugaaacgccgaaugcuacaacugauuacucgucaacuucaaauuuauuugaaguagaaacuguaauacauguugaguuuuauauaauaccaagaucgcaagaaucuaaguguagugaauauauaaauacuggguua

SEQ ID NO: 140 - RNA, 477 nt, Artificial Sequence
  derived and/or modified CDS sequence (wt) from RVA/1076/P[6]__AAA47337.1__VP8*(65-223)
cucgaugguccuuaucaaccaacaaguuuuaagccaccaagcgauuacuggauauuauugaauccaacuaaucaacaaguuguauuagaggguaccaauaaaacugauauuuggguugcuuuauuacuuguugaaccaaacguaaccaaucaaaguagacaauacacauuauuuggagaaacgaaacaaauuacuguagaaaauaacacaaacaaauggaaauucuucgaaauguucagaagcaguguuagugccgaauuucaacauaagcgcacuuuaacaucagacacuaaauuagcuggauuuuuaaaauuuuauaauaguguuuggacuuucuacggugaaacgccacaugcuacaacugauuacucaucaacuucaaauuuaucugaaguagaaacugcaauacauguugaguuuuauauaauaccaagaucgcaagaaucuaaguguaaugaauauauaaauacuggguua

SEQ ID NO: 141 - RNA, 477 nt, Artificial Sequence
  derived and/or modified CDS sequence (wt) from RVA/BE1128/P[8]__AEX30671.1__VP8*(65-223)
uuagaugguccuuaucaaccuacuacauuuacaccaccuacugauuauuggauacuuauuaccucaaauacaaauggaguaguauacgagaguacaaauaauagugacuuuuggacugcagucauugcuguagaaccgcacgucaauccaguagauagacaauauaauguauuuggugaaaauaaacaauuuaauguaagaaaugauucagauaaauggaaguuuuuagaaauguuuagaggcaguagucaaaaugacuuuuauaauagacguacacuaacuucugauacuagacucguaggaauauuaaaauaugguggaagaguauggacauuucauggugaaacaccgagggcuaccacugauaguucaaacacugcaaauuuggacgguauaucaauuacaauucauucagaauuuuauauuauuccaaggucccaagagucuaaguguaaugaauauauuaacaacggucug

SEQ ID NO: 142 - RNA, 477 nt, Artificial Sequence
  derived and/or modified CDS sequence (wt) from RVA/Wa-VirWa/P[8]__ACR22783.1__VP8*(65-223)
uuagaugguccuuaucagccaacuacauuuacuccaccuaaugauuauuggauacuuauuaauucaaauacaaauggaguaguauaugaaaguacaaauaauagugacuuuuggacugcagucguugcuauugaaccgcacguuaacccaguagauagacaauauacgauauuuggugaaaguaagcaauuuaaugugcguaacgauucaaauaaauggaaguuuuuagaaauguuuagaagcaguagucaaaaugaauuuuauaauagacguacauuaacuucugauacuagacuuguaggaauauugaaauaugguggaagaguauggacauuucauggugaaacaccaagagcuacuacugacaguucaaguacugcaaauuuaaauaauauaucaauuacaauucauucagaauuuuacauuauuccaaggucccaagaaucuaaauguaaugaauauauuaauaauggucug

SEQ ID NO: 143 - RNA, 477 nt, Artificial Sequence
  derived and/or modified CDS sequence (wt) from RVA/Wa/P[8]__AAA47290.1__VP8*(65-223)
uuagaugguccuuaucagccaacuacauuuacuccaccuaaugauuauuggauacuuauuaauucaaauacaaauggaguaguauaugaaaguacaaauaauagugacuuuuggacugcagucguugcuauugaaccgcacguuaacccaguagauagacaauauacgauauuuggugaaaguaagcaauuuaaugugaguaacgauucaaauaaauggaaguuuuuagaaauguuuagaagcaguagucaaaaugaauuuuauaauagacguacauuaacuucugauacuagauuuguaggaauauugaaauaugguggaagaguauggacauuucauggugaaacaccaagagcuacuacugacaguucaaguacugcaaauuuaaauaauauaucaauuacaauucauucagaauuuuacauuauuccaaggucccaagaaucuaaauguaaugaauauauuaauaauggucug

SEQ ID NO: 144 - RNA, 477 nt, Artificial Sequence; identical to SEQ ID NO: 143
  derived and/or modified CDS sequence (wt) from RVA/Wa/P[8]__AAA66953.1__VP8*(65-223)

SEQ ID NO: 145 - RNA, 549 nt, Artificial Sequence
  derived and/or modified CDS sequence (wt) from RVA/BE1058/P[4]__AEX30665.1__VP8*(41-223)
gcacagacuagauaugcuccagucaauuggggacacggagagauuaaugauucaacuacaguggaaccaguuuuagaugguccuuaucaaccaacuacauuuaaaccacccaaugauuauuggcugcuuauuaguucgaauacagauggaguagucuaugagaguacaaauaauagugacuuuuggacagcggucauugcugucgaaccacaugucaaucaaacaaauagacaauauguuuuauuuggugagaauaagcaguuuaacauagaaaauaguucagauaaauggaaauuuuucgagauguuuaaagguaauagucagagugauuuuucuaauagacggacuuuaaccucuagcaauagacuuguaggaaugcuaaaguaugguggaagaguauggacguuucauggugaaacaccaagagcuacuacugauaguucgaguacugcggauuuaaauaauauaucaauuauaauucauucagaguuuuauauuauuccaagaucccaagaaucuaaauguaaugaauauaucaauaaugguuua

SEQ ID NO: 146 - RNA, 549 nt, Artificial Sequence
  derived and/or modified CDS sequence (wt) from RVA/DS-1/P[4]__CAD62680.1__VP8*(41-223)
gcacaaaccagauacgcuccaguuaauuggggaucaugggagauuaaugauucaacuacaguugaaccaguuuuagaugguccuuaucaacccacuacauucaaaccacccaaugauuauugguugcuuauuaguucaaauacaaauggaguagucuacgaaaguacaaauaauaaugacuuuuggacugcaguaucaucaguugaaccacauguuagucaaacaaauaggcaauauauuuuauuuggggaaaauaagcaguucaacguagaaaacaauucagauaaauggaaauuuuucgaaacguuuacagguaguagucaggguaauuuuucuaauagacggacucuaacuucuaguaauagacuuguagggaugcuaaaauaugguggaagaguauggacauuucauggugaaacaccaagagcuacuacugauaguucaaauacugcggauuuaaauaauauaucaauuauaauucauucagaguuuuauauuauuccaagaucccaagaaucuaaauguaacgaguauaucaauaaugguuua

SEQ ID NO: 147 - RNA, 549 nt, Artificial Sequence; identical to SEQ ID NO: 146
  derived and/or modified CDS sequence (wt) from RVA/DS-1/P[4]__ABV53252.1__VP8*(41-223)

SEQ ID NO: 148 - RNA, 549 nt, Artificial Sequence
  derived and/or modified CDS sequence (wt) from RVA/F01322/P[6]__AFA51886.1__VP8*(41-223)
gcucaaacaaauuaugcaccagugacuuggagucauggggaagugaaugauucgacaacaauagagccaguacucgaugguccuuaucaaccaacaaauuuuaagccaccaaacgauuacuggauauuauugaauccaacuaaucaacaaguuguauuagaagguaccaauaaaacugauaucuggguugcuuuauuacuuguugaaccaaacguaaccaaucaaaguagacaauacacauuauuuggagaaacgaaacaaauuacuguagaaaauaacacaaacaaauggaaauucuucgaaauguucagaaguaguguuagugcugaauuucaacauaagcgcacuuuaacaucagacacuaaauuagcuggguuuaugaaauuuuauaauaguguuuggacuuuucauggugaaacgccgaaugcuacaacugauuacucgucaacuucaaauuuauuugaaguagaaacuguaauacauguugaguuuuauauaauaccaagaucgcaagaaucuaaguguagugaauauauaaauacuggguua

SEQ ID NO: 149 - RNA, 549 nt, Artificial Sequence
  derived and/or modified CDS sequence (wt) from RVA/1076/P[6]__AAA47337.1__VP8*(41-223)
gcucaaacaaauuaugcaccagugacuuggagucauggggaagugaaugauucgacaacaauagagccaguacucgaugguccuuaucaaccaacaaguuuuaagccaccaagcgauuacuggauauuauugaauccaacuaaucaacaaguuguauuagaggguaccaauaaaacugauauuuggguugcuuuauuacuuguugaaccaaacguaaccaaucaaaguagacaauacacauuauuuggagaaacgaaacaaauuacuguagaaaauaacacaaacaaauggaaauucuucgaaauguucagaagcaguguuagugccgaauuucaacauaagcgcacuuuaacaucagacacuaaauuagcuggauuuuuaaaauuuuauaauaguguuuggacuuucuacggugaaacgccacaugcuacaacugauuacucaucaacuucaaauuuaucugaaguagaaacugcaauacauguugaguuuuauauaauaccaagaucgcaagaaucuaaguguaaugaauauauaaauacuggguua

SEQ ID NO: 150 - RNA, 549 nt, Artificial Sequence
  derived and/or modified CDS sequence (wt) from RVA/BE1128/P[8]__AEX30671.1__VP8*(41-223)
gcucaaacgagauaugcuccaguuaauuggggucauggagaaauaaaugauucaacgacaguggaaccaauuuuagaugguccuuaucaaccuacuacauuuacaccaccuacugauuauuggauacuuauuaccucaaauacaaauggaguaguauacgagaguacaaauaauagugacuuuuggacugcagucauugcuguagaaccgcacgucaauccaguagauagacaauauaauguauuuggugaaaauaaacaauuuaauguaagaaaugauucagauaaauggaaguuuuuagaaauguuuagaggcaguagucaaaaugacuuuuauaauagacguacacuaacuucugauacuagacucguaggaauauuaaaauaugguggaagaguauggacauuucauggugaaacaccgagggcuaccacugauaguucaaacacugcaaauuuggacgguauaucaauuacaauucauucagaauuuuauauuauuccaaggucccaagagucuaaguguaaugaauauauuaacaacggucug

SEQ ID NO: 151 - RNA, 549 nt, Artificial Sequence
  derived and/or modified CDS sequence (wt) from RVA/Wa-VirWa/P[8]__ACR22783.1__VP8*(41-223)
gcacagacuagauaugcuccagucaauuggggucauggagagauaaaugauucgacuacaguagaaccaauuuuagaugguccuuaucagccaacuacauuuacuccaccuaaugauuauuggauacuuauuaauucaaauacaaauggaguaguauaugaaaguacaaauaauagugacuuuuggacugcagucguugcuauugaaccgcacguuaacccaguagauagacaauauacgauauuuggugaaaguaagcaauuuaaugugcguaacgauucaaauaaauggaaguuuuuagaaauguuuagaagcaguagucaaaaugaauuuuauaauagacguacauuaacuucugauacuagacuuguaggaauauugaaauaugguggaagaguauggacauuucauggugaaacaccaagagcuacuacugacaguucaaguacugcaaauuuaaauaauauaucaauuacaauucauucagaauuuuacauuauuccaaggucccaagaaucuaaauguaaugaauauauuaauaauggucug

SEQ ID NO: 152 - RNA, 549 nt, Artificial Sequence
  derived and/or modified CDS sequence (wt) from RVA/Wa/P[8]__AAA47290.1__VP8*(41-223)
gcacagacuagauaugcuccagucaauuggggucauggagagauaaaugauucgacuacaguagaaccaauuuuagaugguccuuaucagccaacuacauuuacuccaccuaaugauuauuggauacuuauuaauucaaauacaaauggaguaguauaugaaaguacaaauaauagugacuuuuggacugcagucguugcuauugaaccgcacguuaacccaguagauagacaauauacgauauuuggugaaaguaagcaauuuaaugugaguaacgauucaaauaaauggaaguuuuuagaaauguuuagaagcaguagucaaaaugaauuuuauaauagacguacauuaacuucugauacuagauuuguaggaauauugaaauaugguggaagaguauggacauuucauggugaaacaccaagagcuacuacugacaguucaaguacugcaaauuuaaauaauauaucaauuacaauucauucagaauuuuacauuauuccaaggucccaagaaucuaaauguaaugaauauauuaauaauggucug

SEQ ID NO: 153 - RNA, 549 nt, Artificial Sequence
  derived and/or modified CDS sequence (wt) from RVA/Wa/P[8]__AAA66953.1__VP8*(41-223)
gcacagacuagauaugcuccagucaauuggggucauggagagauaaaugauucgacuacaguagaaccaauguuagaugguccuuaucagccaacuacauuuacuccaccuaaugauuauuggauacuuauuaauucaaauacaaauggaguaguauaugaaaguacaaauaauagugacuuuuggacugcagucguugcuauugaaccgcacguuaacccaguagauagacaauauacgauauuuggugaaaguaagcaauuuaaugugaguaacgauucaaauaaauggaaguuuuuagaaauguuuagaagcaguagucaaaaugaauuuuauaauagacguacauuaacuucugauacuagauuuguaggaauauugaaauaugguggaagaguauggacauuucauggugaaacaccaagagcuacuacugacaguucaaguacugcaaauuuaaauaauauaucaauuacaauucauucagaauuuuacauuauuccaaggucccaagaaucuaaauguaaugaauauauuaauaauggucug

SEQ ID NO: 154 - RNA, 2328 nt, Artificial Sequence
  derived and/or modified CDS sequence (opt1) from RVA/BE1058/P[4]__AEX30665.1__VP4
auggccagccugaucuaccgccagcuccugaccaacuccuacagcguggaccugcacgacgagaucgagcagaucggcuccgagaagacccagaacgucacggugaaccccgggccguucgcccagacccgguacgcgcccgugaacuggggccacggggagaucaacgacagcaccaccgucgagcccgugcucgacggccccuaccagcccacgaccuucaagccgcccaacgacuacuggcugcugaucuccagcaacaccgacgggguggucuacgaguccaccaacaacagcgacuucuggacggccgugaucgccguggagccccacgucaaccagaccaaccgccaguacgugcuguucggcgagaacaagcaguucaacaucgagaacuccagcgacaaguggaaguucuucgagauguucaagggcaacucccagagcgacuucuccaaccggcgcacccugaccagcuccaaccggcugguggggaugcucaaguacggcgggcgcgucuggacguuccacggcgagaccccgcgggccaccaccgacagcuccagcacggccgaccugaacaacaucuccaucaucauccacagcgaguucuacaucaucccccgcagccaggaguccaagugcaacgaguacaucaacaacgggcugccgcccauccagaacacccggaacguggugccgcucagccuguccagccgcuccauccaguaccggcgcgcgcaggucaacgaggacaucaccaucagcaagaccucccuguggaaggagaugcaguacaaccgggacaucaucauccgcuucaaguucggcaacagcgugaucaagcucggcgggcugggcuacaagugguccgagaucagcuacaaggccgccaacuaccaguacuccuacagccgggacggggagcaggugacggcccacaccaccugcuccgucaacggcgugaacaacuucagcuacaacggcgggucccugcccaccgacuucagcaucucccgcuacgaggugaucaaggagaacagcuacgucuacaucgacuacugggacgacuccaaggcguuccggaacaugguguacgugcgcagccucgccgccaaccugaacagcgucaagugcgccggcggguccuacgacuuccggcugcccgugggcgaguggcccaucaugaacgggggcgccgucagccuccacuucgcgggcgugacgcuguccacccaguucaccgacuucgugagccugaacucccuccgcuuccgguucagccugaccgucgacgagccguccuucagcaucauccgcacgcgcaccaugaaccuguacgggcuccccgccgccaaccccaacaacggcaacgaguacuacgagguguccgggcgguucagccugaucucccuggugcccaccaacgacgacuaccagacccccaucaugaacagcgucacggugcgccaggaccucgagcggcagcugaacgaccugcgcgaggaguucaacucccucagccaggagaucgccaugucccagcugaucgaccuggcccuccugccccuggacauguucagcauguucuccggcaucaagagcaccaucgaccucaccaagagcauggcgaccuccgugaugaagaaguuccggaagagcaagcuggccacguccaucagcgagaugaccaacucccugagcgacgccgccuccagcgccucccgcagcgcguccauccggagcaaccucuccgccaucagcaacugguccgacgccagcaaguccguccugaacgugaccgacagccugaacgacguguccacccagaccagcacgaucagcaagaagcuccgccugaaggagaugaucacccagaccgaggggaucaacuucgacgacaucuccgccgccguccugaagaccaagauggacaugagcacgcagaucggcaagaacacccugcccgacaucgugaccgaggcguccgagaaguucauccccaagcggagcuaccgcgugcucaaggacgacgaggucauggaggugaacaccgagggcaaguucuucgccuacaagguggacacgcugaacgagaucccguucgacaucaacaaguucgccgagcuggucaccgacucccccgugaucagcgccaucaucgacuucaagacccucaagaaccugaacgacaacuacgggaucacccggaucgaggcgcuggaccucaucaaguccaaccccaacgugcugcgcaacuucaucaaccagaacaaccccaucauccggaaccgcaucgagcagcugauccuccagugcaagcuguga

SEQ ID NO: 155 - RNA, 2328 nt, Artificial Sequence
  derived and/or modified CDS sequence (opt1) from RVA/DS-1/P[4]__CAD62680.1__VP4
auggccagccugaucuaccgccagcuccugaccaacuccuacagcguggaccugcacgacgagaucgagcagaucggcuccgagaagacccagagcgucacggugaaccccgggccguucgcccagacccgguacgcgcccgugaacuggggcuccugggagaucaacgacagcaccaccgucgagcccgugcucgacgggcccuaccagccgacgaccuucaagccgcccaacgacuacuggcugcugaucuccagcaacaccaacggcguggucuacgaguccaccaacaacaacgacuucuggacggccgugagcuccguggagccccacgucagccagaccaaccgccaguacauccucuucggggagaacaagcaguucaacguggagaacaacuccgacaaguggaaguucuucgagaccuucaccggcagcucccagggcaacuucagcaaccggcgcacgcugaccuccagcaaccggcugguggggaugcucaaguacggcgggcgcgucuggaccuuccacggcgagacgccccgggccaccaccgacuccagcaacaccgccgaccugaacaacaucagcaucaucauccacuccgaguucuacaucaucccccgcagccaggaguccaagugcaacgaguacaucaacaacgggcugccgcccauccagaacacccggaacguggugccccucagccuguccagccgcuccauccaguacaagcgggcccaggucaacgaggacaucacgaucagcaagaccucccuguggaaggagaugcaguacaaccgcgacaucaucauccgguucaaguucggcaacagcaucaucaagcucggcgggcugggcuacaagugguccgagaucagcuacaaggcggccaacuaccaguacuccuacagccgcgacggggagcaggucaccgcccacaccacgugcuccgugaacggcgugaacaacuucagcuacaacggcgggucccugcccaccgacuucagcaucucccgguacgaggugaucaaggagaacagcuacguguacaucgacuacugggacgacagcaaggccuuccgcaacauggucuacgugcggucccucgcggccaaccugaacagcgugaagugcaccggcggguccuacaacuuccgccugcccgucggcaaguggcccaucauggacgggggcgccgugagccuccacuucgccggcgucacccuguccacgcaguucaccgacuucgugagccugaacucccuccgguuccgcuucagccugaccguggacgagccguccuucagcaucauccggacccgcacgaucaaccuguacgggcuccccgccgcgaaccccaacaacggcaacgaguacuacgagauguccgggcgcuucagccugaucucccugguccagaccaacgacgacuaccagacccccaucaugaacagcgugaccgugcggcaggaccucgagcgccagcugaacgaccugcgggaggaguucaacucccucagccaggagaucgccaugucccagcugaucgaccuggcccuccugccgcuggacauguucagcauguucagcggcaucaaguccacgaucgaccucaccaagagcauggccaccuccgucaugaagaaguuccgcaagagcaagcuggccaccuccaucagcgagaugaccaacucccugagcgacgcggccuccagcgccucccggagcgccuccauccgcagcaaccucuccacgaucagcaacuggaccaacaccuccaagagcguguccaacgugaccgacagcgucaacgacgugagcacgcagaccuccaccaucagcaagaagcugcggcugcgcgagaugaucacccagacggaggggcucuccuucgacgacaucagcgccgcggugcugaagaccaagaucgacauguccacccagaucggcaagaacacccugcccgacaucgucacggaggccagcgagaaguucauccccaagcgguccuaccgcgugcugaaggacgacgaggugauggagaucaacaccgagggcaaguucuucgccuacaaggucgacacccucaacgagauccccuucgacaucaacaaguucgccgagcuggugaccgacagcccggugaucuccgccaucaucgacuucaagacgcugaagaaccucaacgacaacuacgggaucacccggaucgaggcguucaaccugaucaagagcaaccccaacguccugcgcaacuucaucaaccagaacaaccccaucauccggaaccgcaucgagcagcucauccugcagugcaagcuguga

SEQ ID NO: 156 - RNA, 2328 nt, Artificial Sequence; identical to SEQ ID NO: 155
  derived and/or modified CDS sequence (opt1) from RVA/DS-1/P[4]__ABV53252.1__VP4

SEQ ID NO: 157 - RNA, 2328 nt, Artificial Sequence
  derived and/or modified CDS sequence (opt1) from RVA/F01322/P[6]__AFA51886.1__VP4
auggccagccugaucuaccgccagcuccugaccaacuccuacaccguggagcugagcgacgagaucaacacgaucggcuccgagaagaaccagaacgucaccaucaaccccgggcccuucgcccagaccaacuacgcgcccgugaccuggagccacggcgaggugaacgacuccacgaccaucgagcccguccucgacgggcccuaccagccgaccaacuucaagccgcccaacgacuacuggauccugcugaaccccaccaaccagcagguggugcucgagggcacgaacaagaccgacaucugggucgcccugcugcucguggagccgaacgugaccaaccagagccggcaguacacccuguucggggagacgaagcagaucaccgucgagaacaacaccaacaaguggaaguucuucgagauguuccgcuccagcguguccgccgaguuccagcacaagcggacccugacgagcgacaccaagcucgccggcuucaugaaguucuacaacuccguguggaccuuccacggcgagacccccaacgccacgaccgacuacagcuccaccagcaaccuguucgaggucgagaccgugauccacguggaguucuacaucaucccccgcucccaggagagcaagugcuccgaguacaucaacacggggcugcccccgaugcagaacacccggaacaucguccccguggcgcucagcucccgcagcgugaccuaccagcgggcccaggucaacgaggacaucaucaucagcaagaccucccuguggaaggagaugcaguacaaccgcgacaucaucauccgguucaaguucaacaacagcaucgugaagcugggcgggcucggcuacaagugguccgagaucagcuucaaggccgccaacuaccaguacaacuaccugcgcgacggggagcaggugacggcgcacaccaccugcuccgucaacggcgugaacaacuucagcuacaacggcgggucccugcccaccgacuucagcgugucccgguacgaggucaucaaggagaacagcuacguguacgucgacuacugggacgacucccaggccuuccgcaacaugguguacgugcggagccucgccgccaaccugaacuccgucaagugcagcggcgggaacuacaacuuccagauccccgugggcgccuggcccgugauguccggcggggcggucagccugcacuucgccggcgugacgcucuccacccaguucaccgacuucgugagccugaacucccugcgcuuccgguucagccucaccgucgaggagccgcccuucagcauccugcgcacgcggguguccgggcuguacggccuccccgccuucgacccgaacaacgggcacgaguacuacgagaucaacggccgcuucagccugaucucccuggugcccagcaacgacgacuaccagacccccaucaugaacuccgucaccgugcggcaggaccucgagcgccagcugggcgaccugcgggaggaguucaacagccucucccaggagaucgccaugacccagcugaucgaccuggcccuccugccccuggacauguucagcauguucuccgggaucaagagcaccaucgacgcggccaaguccauggccacgaaggugaugaagaaguucaagaagagcggccucgccaccuccaucagcgagcugaccgggucccugagcaacgccgcguccagcgucagccgcaacuccagcauccgcuccaacaucagcuccaucagcguguggaccgacguguccgagcagaucgccggcacgagcgacuccguccggaacaucagcacccagaccuccgccaucagcaagaagcuccgccugcgggagaucaccacgcagaccgaggggaugaacuucgacgacaucuccgccgccgugcugaagaccaagaucgacaagagcacccacaucuccccggacacgcugcccgacaucaucaccgagagcuccgagaaguucauccccaagcgcgcguaccgggugcucaaggacgacgaggucauggaggccgacguggacggcaaguucuucgccuacaagguggacaccuucgaggagguccccuucgacguggacaaguucguggaccuggucaccgacagcccggugaucuccgccaucaucgacuucaagacgcugaagaaccucaacgacaacuacggcaucacccgcagccaggcgcuggaccugauccggagcgacccccgcgugcuccgggacuucaucaaccagaacaaccccaucaucaagaaccgcaucgagcagcugauccugcagugccggcucuga

SEQ ID NO: 158 - RNA, 2328 nt, Artificial Sequence
  derived and/or modified CDS sequence (opt1) from RVA/1076/P[6]__AAA47337.1__VP4
auggccagccugaucuaccgccagcuccugaccaacuccuacaccguggagcugagcgacgagaucaacacgaucggcuccgagaagucccagaacgucaccaucaaccccgggccguucgcccagaccaacuacgcgcccgugaccuggagccacggcgaggugaacgacagcacgaccaucgagcccguccucgacgggcccuaccagccgaccuccuucaagccgcccagcgacuacuggauccugcugaaccccaccaaccagcaggucgugcucgagggcacgaacaagaccgacaucuggguggcccugcugcucguggagcccaacgugaccaaccagucccggcaguacacccuguucggggagacgaagcagaucaccgucgagaacaacaccaacaaguggaaguucuucgagauguuccgcagcuccgugagcgccgaguuccagcacaagcggacccugacguccgacaccaagcucgccggcuuccugaaguucuacaacagcguguggaccuucuacggcgagacgccccacgccaccaccgacuacuccagcaccuccaaccugagcgaggucgagaccgcgauccacguggaguucuacaucaucccccgcucccaggagagcaagugcaacgaguacaucaacacggggcugcccccgaugcagaacacccggaacaucgugcccgucgcccucagcucccgcagcgugaccuaccagcgggcccaggugaacgaggacaucaucaucuccaagaccagccuguggaaggagaugcaguacaaccgcgacaucaucauccgguucaaguucaacaacuccaucgucaagcucggcgggcugggcuacaaguggcccgagaucagcuucaaggccgcgaacuaccaguacaacuaccugcgcgacggggagcaggucauggcccacacgaccugcuccgugaacggcgagaacaacuacagcuacaacggcgggcuccugcccacccacuucuccgugagccgguacgaggugaucaaggagaacuccuacguguacgacaacuacugggacgacagccaggccuuccgcaacauggucuacgugcggucccuggccgccaaccucaacagcgucaagugcuccggcgggaacuacaacuuccagaugccggugggcgcguggcccgugaugagcggcggggccgucucccugcacuucgccggcgugacccugagcacggaguucaccgacuucgugucccucaacagccugcgcuuccgguucagccugaccgucgaggagccgcccuucuccauccuccgcacccgggugagcgggcuguacggccugcccgccuucaaccccaacaacgggcacgaguacuacgagaucgccggccgcuucuccuucauccuccuggugcccagcaacgacgacuaccagacgcccaucaugaacuccgucaccgugcggcaggaccuggagcgccagcucggcgaccugcgggaggaguucaacagccugucccaggagaucgcgaugacccagcucaucgaccuggcccugcucccgcuggacauguucagcauguucuccgggaucaagagcaccaucgacgccgccaaguccauggccaccauggugaugaagaaguucaagaaguccggccuggcgacgagcaucagcgagcucacccgcucccugagcaacgccgccuccagcgucagccgcuccagcuccaucaagagcaacaucuccagcaucuccguguggaccgacgugagcgagcagaucaccggguccagcgacuccguccggaacaucagcacgcagaccuccgccaucagcaagcgccugcggcugcgcgagaucaccacccagacggagggcaugaacuucaucgacaucuccgccgcggugcucaagaccaagaucgacaagagcacccacaucucccccgacacccugcccgacaucaucacggagagcuccgagaaguuccugcccaagcgggccuaccgcgugcucaaggacgacgaggucauggagguggacguggacgggaaguucuucgccuacaaggucgacaccuucgaggaggugccguucgacguggacaaguucgucgaccuggugaccgacagccccgugaucagcgccaucaucgacuucaagacccugaagaaccucaacgacaacuacggcaucacgcggucccaggcgcuggaccugauccgcagcgacccccggguccuccgcgacuucaucaaccagaacaacccgaucaucaagaaccggaucgagcagcugauccugcagugccgccucuga

SEQ ID NO: 159 - RNA, 2328 nt, Artificial Sequence
  derived and/or modified CDS sequence (opt1) from RVA/BE1128/P[8]__AEX30671.1__VP4
auggccagccugaucuaccgccagcuccugaccaacuccuacagcguggaccugcacgacgagaucgagcagaucggcuccgagaagacccagaacgucacggugaaccccgggcccuucgcccagacccgguacgcgcccgugaacuggggccacggggagaucaacgacagcaccaccgucgagcccauccucgacggcccguaccagccgacgaccuucaccccgcccaccgacuacuggauccugaucacguccaacaccaacggggugguguacgagagcaccaacaacuccgacuucuggaccgccgucaucgccguggagccccacgugaacccggucgaccgccaguacaacguguucggcgagaacaagcaguucaacgugcggaacgacagcgacaaguggaaguuccuggagauguuccgcggcuccagccagaacgacuucuacaaccggcgcacgcucaccuccgacacccggcuggucgggauccugaaguacggcgggcgcguguggaccuuccacggcgagacgccccgggccaccaccgacagcuccaacaccgccaaccucgacgggaucagcaucacgauccacuccgaguucuacaucaucccccgcagccaggaguccaagugcaacgaguacaucaacaacggccugcccccgauccagaacacccggaacguggucccccugagccucuccagccgcagcauccaguacaagcgggcgcaggugaacgaggacaucaccaucuccaagaccagccuguggaaggagaugcaguacaaccgcgacaucaucauccgguucaaguucggcaacuccaucgugaagcugggcgggcucggguacaaguggagcgagaucuccuacaaggccgccaacuaccaguacaacuaccugcgcgacggcgagcaggucacggcccacaccaccugcagcgugaacggcgugaacaacuucuccuacaacgggggcagccugcccaccgacuucuccgucagccgguacgaggugaucaaggagaacuccuacguguacgucgacuacugggacgacagcaaggcguuccgcaacaugguguacguccggucccucgccgccaaccugaacagcgugaagugcacgggcggguccuacgacuucagcauccccgugggggccuggccggucaugaacggcggcgccgugucccugcacuucgcgggggugacccucagcacccaguucaccgacuucgucucccugaacagccugcgcuuccgguucagccucacgguggacgagcccuccuucagcauccugcgcacccgcaccgugaaccuguacggccuccccgccgccaaccccaacaacgggaacgaguacuacgagaucuccggccgguucagccugaucucccuggucccgaccaacgacgacuaccagacgcccaucaugaacagcgugaccgugcgccaggaccucgagcggcagcugaccgaccugcgcgaggaguucaacucccucagccaggagaucgccaugucccagcugaucgaccuggcccuccugccccuggacauguucagcauguucuccgggaucaagagcaccaucgaccucaccaaguccauggcgacgagcgucaugaagaaguuccggaaguccaagcuggccaccagcguguccgagaugaccaacagccugagcgacgccgccuccagcgccucccgcagcguguccguccggagcaacaucuccgcggugagcaacuggaccaacguguccaacgacgucagcaacgugacgaacuccgugaacgacaucagcacccagaccuccaccaucagcaagaaccuccgccugaaggagaugaucacgcagaccgagggcauguccuucgacgacaucagcgccgccguccugaagaccaagaucgacauguccacccagaucggcaagaacacgcuccccgacaucgugaccgaggccagcgagaaguucaucccgaagcgguccuaccgcauccugaaggacgacgaggugauggagaucaacaccgaggggaaguucuucgccuacaagaucgacacccugaacgagguccccuucgacgugaacaaguucacggagcuggugaccaacagccccgucaucagcgcgaucaucgacuucaagacccucaagaaccugaacgacaacuacggcaucacccggacggaggcccugaaccucaucaaguccaaccccaacgugcugcgcaacuucaucaaccagaacaacccgaucauccggaaccgcaucgagcagcugauccuccagugcaagcuguga

SEQ ID NO: 160 - RNA, 2328 nt, Artificial Sequence
  derived and/or modified CDS sequence (opt1) from RVA/Wa-VirWa/P[8]__ACR22783.1__VP4
auggccagccugaucuaccgccagcuccugaccaacuccuacagcguggaccugcacgacgagaucgagcagaucggcuccgagaagacccagaacgucacgaucaaccccagccccuucgcccagacccgguacgcgcccgugaacugggggcacggcgagaucaacgacuccaccaccguggagcccauccucgacgggcccuaccagccgacgaccuucaccccgcccaacgacuacuggauccugaucaacagcaacaccaacggcgucguguacgaguccacgaacaacagcgacuucuggaccgccguggucgccaucgagccccacgugaacccgguggaccgccaguacaccaucuucggggaguccaagcaguucaacguccggaacgacagcaacaaguggaaguuccuggagauguuccgcuccagcucccagaacgaguucuacaaccggcgcacccucacgagcgacacccggcuggugggcauccugaaguacggcgggcgcguguggaccuuccacggcgagaccccgcgggccacgaccgacuccagcuccaccgccaaccucaacaacaucagcaucaccauccacuccgaguucuacaucaucccccgcagccaggagagcaagugcaacgaguacaucaacaacgggcugcccccgauccagaacacgcggaacgucgugccccugccccucuccagccgcuccauccaguacaagcgggcgcaggugaacgaggacaucaucgucagcaagaccucccuguggaaggagaugcaguacaaccgcgacaucaucauccgguucaaguucggcaacagcaucgugaagaugggcgggcugggcuacaagugguccgagaucagcuacaaggccgccaacuaccaguacaacuaccuccgcgacggggagcaggugaccgcccacaccacgugcuccgucaacggcgugaacaacuucagcuacaacgggggcucccugcccaccgacuucggcaucagccgguacgaggugaucaaggagaacuccuacgucuacguggacuacugggacgacagcaaggcguuccgcaacaugguguacguccggucccuggccgccaaccucaacagcgugaagugcaccgggggcuccuacgacuucagcaucccggucggggccuggcccgugaugaacggcggggccgugucccugcacuucgcgggcgucacccugagcacgcaguucaccgacuucgugagccucaacucccugcgcuuccgguucagccugaccguggacgagccgcccuucuccauccuccgcacccgcacggucaaccuguacggccugcccgccgccaaccccaacaacgggaacgaguacuacgagaucagcggccgguucucccucaucagccuggugcccaccaacgacgacuaccagacccccaucaugaacuccgugaccguccgccaggaccuggagcggcagcucacggaccugcgcgaggaguucaacagccugucccaggagaucgccauggcccagcucaucgaccuggcgcugcucccgcuggacauguucagcauguucuccgggaucaagagcaccaucgaccugaccaaguccauggccaccagcgugaugaagaaguuccggaaguccaagcucgccaccagcaucuccgagaugacgaacagccugagcgacgccgccuccagcgcgucccgcaacgugagcauccgguccaaccugagcgccaucuccaacuggaccaacgucagcaacgacguguccaacgugaccaacagccucaacgacaucuccacccagacgagcaccaucuccaagaagcugcgccugaaggagaugaucacccagaccgagggcaugagcuucgacgacaucuccgccgccguccucaagacgaagaucgacaugagcacccagaucgggaagaacacccugcccgacaucgugaccgaggccuccgagaaguucauccccaagcggagcuaccgcauccugaaggacgacgaggugauggagaucaacacggagggcaaguucuucgcguacaagaucaacaccuucgacgagguccccuucgacgugaacaaguucgccgagcuggugaccgacuccccggucaucagcgccaucaucgacuucaagacccucaagaaccugaacgacaacuacggcaucacgcggaccgaggcccugaaccucaucaagagcaaccccaacaugcugcgcaacuucaucaaccagaacaaccccaucauccggaaccgcaucgagcagcugauccuccagugcaagcuguga

SEQ ID NO: 161 - RNA, 2328 nt, Artificial Sequence
  derived and/or modified CDS sequence (opt1) from RVA/Wa/P[8]__AAA47290.1__VP4
auggccagccugaucuaccgccagcuccugaccaacuccuacagcguggaccugcacgacgagaucgagcagaucggcuccgagaagacccagaacgucacgaucaaccccagcccguucgcccagacccgguacgcgcccgugaacugggggcacggcgagaucaacgacuccaccaccguggagcccauccucgacgggcccuaccagccgacgaccuucaccccgcccaacgacuacuggauccugaucaacagcaacaccaacggcgucguguacgaguccacgaacaacagcgacuucuggaccgccguggucgccaucgagccccacgugaaccccguggaccgccaguacaccaucuucggggaguccaagcaguucaacgucagcaacgacuccaacaaguggaaguuccuggagauguuccggagcuccagccagaacgaguucuacaaccgccggacccucacguccgacacccgcuucgugggcauccugaaguacggcgggcggguguggaccuuccacggcgagacgccccgcgccaccaccgacagcuccagcaccgccaaccugaacaacaucuccaucaccauccacagcgaguucuacaucaucccccggagccaggaguccaagugcaacgaguacaucaacaacgggcugcccccgauccagaacacgcgcaacgucgugccccucccccugagcucccggagcauccaguacaagcgcgcccaggugaacgaggacaucaucgucuccaagaccagccucuggaaggagaugcaguacaaccgggacaucaucauccgcuucaaguucggcaacuccaucgugaagaugggcgggcugggcuacaaguggagcgagaucuccuacaaggcggccaacuaccaguacaacuaccugcgggacggggagcaggucaccgcccacaccacgugcagcgugaacggcgugaacaacuucuccuacaacgggggcagccuccccaccgacuucggcaucucccgcuacgaggugaucaaggagaacagcuacgucuacguggacuacugggacgacuccaaggcguuccggaacaugguguacguccgcagccuggccgccaaccugaacuccgugaagugcaccgggggcagcuacaacuucucccucccggucggggccuggcccgugaugaacggcggggccgugagccugcacuucgcgggcgucacccugagcacgcaguucaccgacuucgugucccucaacagccugcgguuccgcuucucccugaccguggacgagccgcccuucagcauccuccggacccgcacggucaaccuguacggccugcccgccgccaaccccaacaacgggaacgaguacuacgagaucuccggccgcuucagccucaucuaccuggugcccaccaacgacgacuaccagacccccaucaugaacuccgugaccguccggcaggaccuggagcgccagcucacggaccugcgggaggaguucaacagccugucccaggagaucgccauggcccagcucaucgaccuggcgcugcucccgcuggggauguucagcauguucuccggcaucaagagcaccaucgaccugaccaaguccauggccaccagcgugaugaagaaguuccgcaaguccaagcucgccaccagcaucuccgagaugacgaacagccugagcgacgccgccuccagcgcgucccggaacgugagcauccgcuccaaccugagcgccaucuccaacuggaccaacgucagcaacgacguguccaacgugaccaacagccucaacgacaucuccacccagacgagcaccaucuccaagaaguuccggcugaaggagaugaucacccagaccgaggggaugagcuucgacgacaucuccgccgccguccugaagacgaagaucgacaugagcacccagaucggcaagaacacccuccccgacaucgugaccgaggccuccgagaaguucauccccaagcgcagcuaccggauccugaaggacgacgaggugauggagaucaacacggagggcaaguucuucgcguacaagaucaacaccuucgacgagguccccuucgacgugaacaaguucgccgagcuggugaccgacuccccggucaucagcgccaucaucgacuucaagacccugaagaaccucaacgacaacuacgggaucacgcgcaccgaggcccugaaccugaucaagagcaaccccaacaugcuccggaacuucaucaaccagaacaaccccaucauccgcaaccggaucgagcagcugauccugcagugcaagcucuga

SEQ ID NO: 162 - RNA, 2328 nt, Artificial Sequence
  derived and/or modified CDS sequence (opt1) from RVA/Wa/P[8]__AAA66953.1__VP4
auggccagccugaucuaccgccagcuccugaccaacuccuacagcguggaccugcacgacgagaucgagcagaucggcuccgagaagacccagaacgucacgaucaaccccagcccguucgcccagacccgguacgcgcccgugaacugggggcacggcgagaucaacgacuccaccaccguggagcccaugcucgacgggcccuaccagccgacgaccuucaccccgcccaacgacuacuggauccugaucaacagcaacaccaacggcgucguguacgaguccacgaacaacagcgacuucuggaccgccguggucgccaucgagccccacgugaaccccguggaccgccaguacaccaucuucggggaguccaagcaguucaacgucagcaacgacuccaacaaguggaaguuccuggagauguuccggagcuccagccagaacgaguucuacaaccgccggacccucacguccgacacccgcuucgugggcauccugaaguacggcgggcggguguggaccuuccacggcgagacgccccgcgccaccaccgacagcuccagcaccgccaaccugaacaacaucuccaucaccauccacagcgaguucuacaucaucccccggagccaggaguccaagugcaacgaguacaucaacaacgggcugcccccgauccagaacacgcgcaacgucgugccccucccccugagcucccggagcauccaguacaagcgcgcccaggugaacgaggacaucaucgucuccaagaccagccucuggaaggagaugcaguacaaccgggacaucaucauccgcuucaaguucggcaacuccaucgugaagaugggcgggcugggcuacaaguggagcgagaucuccuacaaggcggccaacuaccaguacaacuaccugcgggacggggagcaggucaccgcccacaccacgugcagcgugaacggcgugaacaacuucuccuacaacgggggcuuccuccccaccgacuucggcaucagccgcuacgaggugaucaaggagaacuccuacgucuacguggacuacugggacgacagcaaggcguuccggaacaugguguacguccgcucccuggccgccaaccugaacagcgugaagugcaccgggggcuccuacaacuucagcaucccggucggggccuggcccgugaugaacggcggggccgugucccuccacuucgcgggcgucacccugagcacgcaguucaccgacuucgugagccugaacucccuccgguuccgcuucagccugaccguggacgagccgcccuucuccauccugcggacccgcacggucaaccucuacggccugcccgccgccaaccccaacaacgggaacgaguacuacgagaucagcggccgcuucucccugaucuaccucgugcccaccaacgacgacuaccagacccccaucaugaacagcgugaccguccggcaggaccuggagcgccagcugacggaccuccgggaggaguucaacucccugagccaggagaucgccauggcccagcugaucgaccucgcgcugcugccgcucgacauguucuccauguucagcgggaucaaguccaccaucgaccugaccaagagcauggccaccuccgugaugaagaaguuccgcaagagcaagcuggccaccuccaucagcgagaugacgaacucccucagcgacgccgccagcuccgcgagccggaacguguccauccgcagcaaccuguccgccaucagcaacuggaccaacgucuccaacgacgugagcaacgugaccaacucccugaacgacaucagcacccagacguccaccaucagcaagaaguuccggcucaaggagaugaucacccagaccgagggcauguccuucgacgacaucagcgccgccguccugaagacgaagaucgacauguccacccagaucgggaagaacacccugcccgacaucgugaccgaggccagcgagaaguucauccccaagcgcuccuaccggauccucaaggacgacgaggugauggagaucaacacggagggcaaguucuucgcguacaagaucaacaccuucgacgagguccccuucgacgugaacaaguucgccgagcuggugaccgacagcccggucaucuccgccaucaucgacuucaagacccugaagaaccugaacgacaacuacggcaucacgcgcaccgaggcccucaaccugaucaagagcaaccccaacaugcugcggaacuucaucaaccagaacaaccccaucauccgcaaccggaucgagcagcucauccugcagugcaagcuguga

SEQ ID NO: 163 - RNA, 720 nt, Artificial Sequence
  derived and/or modified CDS sequence (opt1) from RVA/BE1058/P[4]__AEX30665.1__VP8*
auggccagccugaucuaccgccagcuccugaccaacuccuacagcguggaccugcacgacgagaucgagcagaucggcuccgagaagacccagaacgucacggugaaccccgggccguucgcccagacccgguacgcgcccgugaacuggggccacggggagaucaacgacagcaccaccgucgagcccgugcucgacggccccuaccagcccacgaccuucaagccgcccaacgacuacuggcugcugaucuccagcaacaccgacgggguggucuacgaguccaccaacaacagcgacuucuggacggccgugaucgccguggagccccacgucaaccagaccaaccgccaguacgugcuguucggcgagaacaagcaguucaacaucgagaacuccagcgacaaguggaaguucuucgagauguucaagggcaacucccagagcgacuucuccaaccggcgcacccugaccagcuccaaccggcugguggggaugcucaaguacggcgggcgcgucuggacguuccacggcgagaccccgcgggccaccaccgacagcuccagcacggccgaccugaacaacaucuccaucaucauccacagcgaguucuacaucaucccccgcagccaggaguccaagugcaacgaguacaucaacaacgggcugccgcccauccagaacacccggaacguggugccgcucagccuguccagccgc

SEQ ID NO: 164 - RNA, 720 nt, Artificial Sequence
  derived and/or modified CDS sequence (opt1) from RVA/DS-1/P[4]__CAD62680.1__VP8*
auggccagccugaucuaccgccagcuccugaccaacuccuacagcguggaccugcacgacgagaucgagcagaucggcuccgagaagacccagagcgucacggugaaccccgggccguucgcccagacccgguacgcgcccgugaacuggggcuccugggagaucaacgacagcaccaccgucgagcccgugcucgacgggcccuaccagccgacgaccuucaagccgcccaacgacuacuggcugcugaucuccagcaacaccaacggcguggucuacgaguccaccaacaacaacgacuucuggacggccgugagcuccguggagccccacgucagccagaccaaccgccaguacauccucuucggggagaacaagcaguucaacguggagaacaacuccgacaaguggaaguucuucgagaccuucaccggcagcucccagggcaacuucagcaaccggcgcacgcugaccuccagcaaccggcugguggggaugcucaaguacggcgggcgcgucuggaccuuccacggcgagacgccccgggccaccaccgacuccagcaacaccgccgaccugaacaacaucagcaucaucauccacuccgaguucuacaucaucccccgcagccaggaguccaagugcaacgaguacaucaacaacgggcugccgcccauccagaacacccggaacguggugccccucagccuguccagccgc

SEQ ID NO: 165 - RNA, 720 nt, Artificial Sequence; identical to SEQ ID NO: 164
  derived and/or modified CDS sequence (opt1) from RVA/DS-1/P[4]__ABV53252.1__VP8*

SEQ ID NO: 166 - RNA, 720 nt, Artificial Sequence
  derived and/or modified CDS sequence (opt1) from RVA/F01322/P[6]__AFA51886.1__VP8*
auggccagccugaucuaccgccagcuccugaccaacuccuacaccguggagcugagcgacgagaucaacacgaucggcuccgagaagaaccagaacgucaccaucaaccccgggcccuucgcccagaccaacuacgcgcccgugaccuggagccacggcgaggugaacgacuccacgaccaucgagcccguccucgacgggcccuaccagccgaccaacuucaagccgcccaacgacuacuggauccugcugaaccccaccaaccagcagguggugcucgagggcacgaacaagaccgacaucugggucgcccugcugcucguggagccgaacgugaccaaccagagccggcaguacacccuguucggggagacgaagcagaucaccgucgagaacaacaccaacaaguggaaguucuucgagauguuccgcuccagcguguccgccgaguuccagcacaagcggacccugacgagcgacaccaagcucgccggcuucaugaaguucuacaacuccguguggaccuuccacggcgagacccccaacgccacgaccgacuacagcuccaccagcaaccuguucgaggucgagaccgugauccacguggaguucuacaucaucccccgcucccaggagagcaagugcuccgaguacaucaacacggggcugcccccgaugcagaacacccggaacaucguccccguggcgcucagcucccgc

SEQ ID NO: 167 - RNA, 720 nt, Artificial Sequence
  derived and/or modified CDS sequence (opt1) from RVA/1076/P[6]__AAA47337.1__VP8*
auggccagccugaucuaccgccagcuccugaccaacuccuacaccguggagcugagcgacgagaucaacacgaucggcuccgagaagucccagaacgucaccaucaaccccgggccguucgcccagaccaacuacgcgcccgugaccuggagccacggcgaggugaacgacagcacgaccaucgagcccguccucgacgggcccuaccagccgaccuccuucaagccgcccagcgacuacuggauccugcugaaccccaccaaccagcaggucgugcucgagggcacgaacaagaccgacaucuggguggcccugcugcucguggagcccaacgugaccaaccagucccggcaguacacccuguucggggagacgaagcagaucaccgucgagaacaacaccaacaaguggaaguucuucgagauguuccgcagcuccgugagcgccgaguuccagcacaagcggacccugacguccgacaccaagcucgccggcuuccugaaguucuacaacagcguguggaccuucuacggcgagacgccccacgccaccaccgacuacuccagcaccuccaaccugagcgaggucgagaccgcgauccacguggaguucuacaucaucccccgcucccaggagagcaagugcaacgaguacaucaacacggggcugcccccgaugcagaacacccggaacaucgugcccgucgcccucagcucccgc

SEQ ID NO: 168 - RNA, 720 nt, Artificial Sequence
  derived and/or modified CDS sequence (opt1) from RVA/BE1128/P[8]__AEX30671.1__VP8*
auggccagccugaucuaccgccagcuccugaccaacuccuacagcguggaccugcacgacgagaucgagcagaucggcuccgagaagacccagaacgucacggugaaccccgggcccuucgcccagacccgguacgcgcccgugaacuggggccacggggagaucaacgacagcaccaccgucgagcccauccucgacggcccguaccagccgacgaccuucaccccgcccaccgacuacuggauccugaucacguccaacaccaacggggugguguacgagagcaccaacaacuccgacuucuggaccgccgucaucgccguggagccccacgugaacccggucgaccgccaguacaacguguucggcgagaacaagcaguucaacgugcggaacgacagcgacaaguggaaguuccuggagauguuccgcggcuccagccagaacgacuucuacaaccggcgcacgcucaccuccgacacccggcuggucgggauccugaaguacggcgggcgcguguggaccuuccacggcgagacgccccgggccaccaccgacagcuccaacaccgccaaccucgacgggaucagcaucacgauccacuccgaguucuacaucaucccccgcagccaggaguccaagugcaacgaguacaucaacaacggccugcccccgauccagaacacccggaacguggucccccugagccucuccagccgc

SEQ ID NO: 169 - RNA, 720 nt, Artificial Sequence
  derived and/or modified CDS sequence (opt1) from RVA/Wa-VirWa/P[8]__ACR22783.1__VP8*
auggccagccugaucuaccgccagcuccugaccaacuccuacagcguggaccugcacgacgagaucgagcagaucggcuccgagaagacccagaacgucacgaucaaccccagccccuucgcccagacccgguacgcgcccgugaacugggggcacggcgagaucaacgacuccaccaccguggagcccauccucgacgggcccuaccagccgacgaccuucaccccgcccaacgacuacuggauccugaucaacagcaacaccaacggcgucguguacgaguccacgaacaacagcgacuucuggaccgccguggucgccaucgagccccacgugaacccgguggaccgccaguacaccaucuucggggaguccaagcaguucaacguccggaacgacagcaacaaguggaaguuccuggagauguuccgcuccagcucccagaacgaguucuacaaccggcgcacccucacgagcgacacccggcuggugggcauccugaaguacggcgggcgcguguggaccuuccacggcgagaccccgcgggccacgaccgacuccagcuccaccgccaaccucaacaacaucagcaucaccauccacuccgaguucuacaucaucccccgcagccaggagagcaagugcaacgaguacaucaacaacgggcugcccccgauccagaacacgcggaacgucgugccccugccccucuccagccgc

SEQ ID NO: 170 - RNA, 720 nt, Artificial Sequence
  derived and/or modified CDS sequence (opt1) from RVA/Wa/P[8]__AAA47290.1__VP8*
auggccagccugaucuaccgccagcuccugaccaacuccuacagcguggaccugcacgacgagaucgagcagaucggcuccgagaagacccagaacgucacgaucaaccccagcccguucgcccagacccgguacgcgcccgugaacugggggcacggcgagaucaacgacuccaccaccguggagcccauccucgacgggcccuaccagccgacgaccuucaccccgcccaacgacuacuggauccugaucaacagcaacaccaacggcgucguguacgaguccacgaacaacagcgacuucuggaccgccguggucgccaucgagccccacgugaaccccguggaccgccaguacaccaucuucggggaguccaagcaguucaacgucagcaacgacuccaacaaguggaaguuccuggagauguuccggagcuccagccagaacgaguucuacaaccgccggacccucacguccgacacccgcuucgugggcauccugaaguacggcgggcggguguggaccuuccacggcgagacgccccgcgccaccaccgacagcuccagcaccgccaaccugaacaacaucuccaucaccauccacagcgaguucuacaucaucccccggagccaggaguccaagugcaacgaguacaucaacaacgggcugcccccgauccagaacacgcgcaacgucgugccccucccccugagcucccgg

SEQ ID NO: 171 - RNA, 720 nt, Artificial Sequence
  derived and/or modified CDS sequence (opt1) from RVA/Wa/P[8]__AAA66953.1__VP8*
auggccagccugaucuaccgccagcuccugaccaacuccuacagcguggaccugcacgacgagaucgagcagaucggcuccgagaagacccagaacgucacgaucaaccccagcccguucgcccagacccgguacgcgcccgugaacugggggcacggcgagaucaacgacuccaccaccguggagcccaugcucgacgggcccuaccagccgacgaccuucaccccgcccaacgacuacuggauccugaucaacagcaacaccaacggcgucguguacgaguccacgaacaacagcgacuucuggaccgccguggucgccaucgagccccacgugaaccccguggaccgccaguacaccaucuucggggaguccaagcaguucaacgucagcaacgacuccaacaaguggaaguuccuggagauguuccggagcuccagccagaacgaguucuacaaccgccggacccucacguccgacacccgcuucgugggcauccugaaguacggcgggcggguguggaccuuccacggcgagacgccccgcgccaccaccgacagcuccagcaccgccaaccugaacaacaucuccaucaccauccacagcgaguucuacaucaucccccggagccaggaguccaagugcaacgaguacaucaacaacgggcugcccccgauccagaacacgcgcaacgucgugccccucccccugagcucccgg

SEQ ID NO: 172 - RNA, 477 nt, Artificial Sequence
  derived and/or modified CDS sequence (opt1) from RVA/BE1058/P[4]__AEX30665.1__VP8*(65-223)
cucgacggccccuaccagcccacgaccuucaagccgcccaacgacuacuggcugcugaucuccagcaacaccgacgggguggucuacgaguccaccaacaacagcgacuucuggacggccgugaucgccguggagccccacgucaaccagaccaaccgccaguacgugcuguucggcgagaacaagcaguucaacaucgagaacuccagcgacaaguggaaguucuucgagauguucaagggcaacucccagagcgacuucuccaaccggcgcacccugaccagcuccaaccggcugguggggaugcucaaguacggcgggcgcgucuggacguuccacggcgagaccccgcgggccaccaccgacagcuccagcacggccgaccugaacaacaucuccaucaucauccacagcgaguucuacaucaucccccgcagccaggaguccaagugcaacgaguacaucaacaacgggcug

SEQ ID NO: 173 - RNA, 477 nt, Artificial Sequence
  derived and/or modified CDS sequence (opt1) from RVA/DS-1/P[4]__CAD62680.1__VP8*(65-223)
cucgacgggcccuaccagccgacgaccuucaagccgcccaacgacuacuggcugcugaucuccagcaacaccaacggcguggucuacgaguccaccaacaacaacgacuucuggacggccgugagcuccguggagccccacgucagccagaccaaccgccaguacauccucuucggggagaacaagcaguucaacguggagaacaacuccgacaaguggaaguucuucgagaccuucaccggcagcucccagggcaacuucagcaaccggcgcacgcugaccuccagcaaccggcugguggggaugcucaaguacggcgggcgcgucuggaccuuccacggcgagacgccccgggccaccaccgacuccagcaacaccgccgaccugaacaacaucagcaucaucauccacuccgaguucuacaucaucccccgcagccaggaguccaagugcaacgaguacaucaacaacgggcug

SEQ ID NO: 174 - RNA, 477 nt, Artificial Sequence; identical to SEQ ID NO: 173
  derived and/or modified CDS sequence (opt1) from RVA/DS-1/P[4]__ABV53252.1__VP8*(65-223)

SEQ ID NO: 175 - RNA, 477 nt, Artificial Sequence
  derived and/or modified CDS sequence (opt1) from RVA/F01322/P[6]__AFA51886.1__VP8*(65-223)
cucgacgggcccuaccagccgaccaacuucaagccgcccaacgacuacuggauccugcugaaccccaccaaccagcagguggugcucgagggcacgaacaagaccgacaucugggucgcccugcugcucguggagccgaacgugaccaaccagagccggcaguacacccuguucggggagacgaagcagaucaccgucgagaacaacaccaacaaguggaaguucuucgagauguuccgcuccagcguguccgccgaguuccagcacaagcggacccugacgagcgacaccaagcucgccggcuucaugaaguucuacaacuccguguggaccuuccacggcgagacccccaacgccacgaccgacuacagcuccaccagcaaccuguucgaggucgagaccgugauccacguggaguucuacaucaucccccgcucccaggagagcaagugcuccgaguacaucaacacggggcug

SEQ ID NO: 176 - RNA, 477 nt, Artificial Sequence
  derived and/or modified CDS sequence (opt1) from RVA/1076/P[6]__AAA47337.1__VP8*(65-223)
cucgacgggcccuaccagccgaccuccuucaagccgcccagcgacuacuggauccugcugaaccccaccaaccagcaggucgugcucgagggcacgaacaagaccgacaucuggguggcccugcugcucguggagcccaacgugaccaaccagucccggcaguacacccuguucggggagacgaagcagaucaccgucgagaacaacaccaacaaguggaaguucuucgagauguuccgcagcuccgugagcgccgaguuccagcacaagcggacccugacguccgacaccaagcucgccggcuuccugaaguucuacaacagcguguggaccuucuacggcgagacgccccacgccaccaccgacuacuccagcaccuccaaccugagcgaggucgagaccgcgauccacguggaguucuacaucaucccccgcucccaggagagcaagugcaacgaguacaucaacacggggcug

SEQ ID NO: 177 - RNA, 477 nt, Artificial Sequence
  derived and/or modified CDS sequence (opt1) from RVA/BE1128/P[8]__AEX30671.1__VP8*(65-223)
cucgacggcccguaccagccgacgaccuucaccccgcccaccgacuacuggauccugaucacguccaacaccaacggggugguguacgagagcaccaacaacuccgacuucuggaccgccgucaucgccguggagccccacgugaacccggucgaccgccaguacaacguguucggcgagaacaagcaguucaacgugcggaacgacagcgacaaguggaaguuccuggagauguuccgcggcuccagccagaacgacuucuacaaccggcgcacgcucaccuccgacacccggcuggucgggauccugaaguacggcgggcgcguguggaccuuccacggcgagacgccccgggccaccaccgacagcuccaacaccgccaaccucgacgggaucagcaucacgauccacuccgaguucuacaucaucccccgcagccaggaguccaagugcaacgaguacaucaacaacggccug

SEQ ID NO: 178 - RNA, 477 nt, Artificial Sequence
  derived and/or modified CDS sequence (opt1) from RVA/Wa-VirWa/P[8]__ACR22783.1__VP8*(65-223)
cucgacgggcccuaccagccgacgaccuucaccccgcccaacgacuacuggauccugaucaacagcaacaccaacggcgucguguacgaguccacgaacaacagcgacuucuggaccgccguggucgccaucgagccccacgugaacccgguggaccgccaguacaccaucuucggggaguccaagcaguucaacguccggaacgacagcaacaaguggaaguuccuggagauguuccgcuccagcucccagaacgaguucuacaaccggcgcacccucacgagcgacacccggcuggugggcauccugaaguacggcgggcgcguguggaccuuccacggcgagaccccgcgggccacgaccgacuccagcuccaccgccaaccucaacaacaucagcaucaccauccacuccgaguucuacaucaucccccgcagccaggagagcaagugcaacgaguacaucaacaacgggcug

SEQ ID NO: 179 - RNA, 477 nt, Artificial Sequence
  derived and/or modified CDS sequence (opt1) from RVA/Wa/P[8]__AAA47290.1__VP8*(65-223)
cucgacgggcccuaccagccgacgaccuucaccccgcccaacgacuacuggauccugaucaacagcaacaccaacggcgucguguacgaguccacgaacaacagcgacuucuggaccgccguggucgccaucgagccccacgugaaccccguggaccgccaguacaccaucuucggggaguccaagcaguucaacgucagcaacgacuccaacaaguggaaguuccuggagauguuccggagcuccagccagaacgaguucuacaaccgccggacccucacguccgacacccgcuucgugggcauccugaaguacggcgggcggguguggaccuuccacggcgagacgccccgcgccaccaccgacagcuccagcaccgccaaccugaacaacaucuccaucaccauccacagcgaguucuacaucaucccccggagccaggaguccaagugcaacgaguacaucaacaacgggcug

SEQ ID NO: 180 - RNA, 477 nt, Artificial Sequence; identical to SEQ ID NO: 179
  derived and/or modified CDS sequence (opt1) from RVA/Wa/P[8]__AAA66953.1__VP8*(65-223)

SEQ ID NO: 181 - RNA, 549 nt, Artificial Sequence
  derived and/or modified CDS sequence (opt1) from RVA/BE1058/P[4]__AEX30665.1__VP8*(41-223)
gcccagacccgguacgcgcccgugaacuggggccacggggagaucaacgacagcaccaccgucgagcccgugcucgacggccccuaccagcccacgaccuucaagccgcccaacgacuacuggcugcugaucuccagcaacaccgacgggguggucuacgaguccaccaacaacagcgacuucuggacggccgugaucgccguggagccccacgucaaccagaccaaccgccaguacgugcuguucggcgagaacaagcaguucaacaucgagaacuccagcgacaaguggaaguucuucgagauguucaagggcaacucccagagcgacuucuccaaccggcgcacccugaccagcuccaaccggcugguggggaugcucaaguacggcgggcgcgucuggacguuccacggcgagaccccgcgggccaccaccgacagcuccagcacggccgaccugaacaacaucuccaucaucauccacagcgaguucuacaucaucccccgcagccaggaguccaagugcaacgaguacaucaacaacgggcug

SEQ ID NO: 182 - RNA, 549 nt, Artificial Sequence
  derived and/or modified CDS sequence (opt1) from RVA/DS-1/P[4]__CAD62680.1__VP8*(41-223)
gcccagacccgguacgcgcccgugaacuggggcuccugggagaucaacgacagcaccaccgucgagcccgugcucgacgggcccuaccagccgacgaccuucaagccgcccaacgacuacuggcugcugaucuccagcaacaccaacggcguggucuacgaguccaccaacaacaacgacuucuggacggccgugagcuccguggagccccacgucagccagaccaaccgccaguacauccucuucggggagaacaagcaguucaacguggagaacaacuccgacaaguggaaguucuucgagaccuucaccggcagcucccagggcaacuucagcaaccggcgcacgcugaccuccagcaaccggcugguggggaugcucaaguacggcgggcgcgucuggaccuuccacggcgagacgccccgggccaccaccgacuccagcaacaccgccgaccugaacaacaucagcaucaucauccacuccgaguucuacaucaucccccgcagccaggaguccaagugcaacgaguacaucaacaacgggcug

SEQ ID NO: 183 - RNA, 549 nt, Artificial Sequence; identical to SEQ ID NO: 182
  derived and/or modified CDS sequence (opt1) from RVA/DS-1/P[4]__ABV53252.1__VP8*(41-223)

SEQ ID NO: 184 - RNA, 549 nt, Artificial Sequence
  derived and/or modified CDS sequence (opt1) from RVA/F01322/P[6]__AFA51886.1__VP8*(41-223)
gcccagaccaacuacgcgcccgugaccuggagccacggcgaggugaacgacuccacgaccaucgagcccguccucgacgggcccuaccagccgaccaacuucaagccgcccaacgacuacuggauccugcugaaccccaccaaccagcagguggugcucgagggcacgaacaagaccgacaucugggucgcccugcugcucguggagccgaacgugaccaaccagagccggcaguacacccuguucggggagacgaagcagaucaccgucgagaacaacaccaacaaguggaaguucuucgagauguuccgcuccagcguguccgccgaguuccagcacaagcggacccugacgagcgacaccaagcucgccggcuucaugaaguucuacaacuccguguggaccuuccacggcgagacccccaacgccacgaccgacuacagcuccaccagcaaccuguucgaggucgagaccgugauccacguggaguucuacaucaucccccgcucccaggagagcaagugcuccgaguacaucaacacggggcug

SEQ ID NO: 185 - RNA, 549 nt, Artificial Sequence
  derived and/or modified CDS sequence (opt1) from RVA/1076/P[6]__AAA47337.1__VP8*(41-223)
gcccagaccaacuacgcgcccgugaccuggagccacggcgaggugaacgacagcacgaccaucgagcccguccucgacgggcccuaccagccgaccuccuucaagccgcccagcgacuacuggauccugcugaaccccaccaaccagcaggucgugcucgagggcacgaacaagaccgacaucuggguggcccugcugcucguggagcccaacgugaccaaccagucccggcaguacacccuguucggggagacgaagcagaucaccgucgagaacaacaccaacaaguggaaguucuucgagauguuccgcagcuccgugagcgccgaguuccagcacaagcggacccugacguccgacaccaagcucgccggcuuccugaaguucuacaacagcguguggaccuucuacggcgagacgccccacgccaccaccgacuacuccagcaccuccaaccugagcgaggucgagaccgcgauccacguggaguucuacaucaucccccgcucccaggagagcaagugcaacgaguacaucaacacggggcug

SEQ ID NO: 186 - RNA, 549 nt, Artificial Sequence
  derived and/or modified CDS sequence (opt1) from RVA/BE1128/P[8]__AEX30671.1__VP8*(41-223)
gcccagacccgguacgcgcccgugaacuggggccacggggagaucaacgacagcaccaccgucgagcccauccucgacggcccguaccagccgacgaccuucaccccgcccaccgacuacuggauccugaucacguccaacaccaacggggugguguacgagagcaccaacaacuccgacuucuggaccgccgucaucgccguggagccccacgugaacccggucgaccgccaguacaacguguucggcgagaacaagcaguucaacgugcggaacgacagcgacaaguggaaguuccuggagauguuccgcggcuccagccagaacgacuucuacaaccggcgcacgcucaccuccgacacccggcuggucgggauccugaaguacggcgggcgcguguggaccuuccacggcgagacgccccgggccaccaccgacagcuccaacaccgccaaccucgacgggaucagcaucacgauccacuccgaguucuacaucaucccccgcagccaggaguccaagugcaacgaguacaucaacaacggccug

SEQ ID NO: 187 - RNA, 549 nt, Artificial Sequence
  derived and/or modified CDS sequence (opt1) from RVA/Wa-VirWa/P[8]__ACR22783.1__VP8*(41-223)
gcccagacccgguacgcgcccgugaacugggggcacggcgagaucaacgacuccaccaccguggagcccauccucgacgggcccuaccagccgacgaccuucaccccgcccaacgacuacuggauccugaucaacagcaacaccaacggcgucguguacgaguccacgaacaacagcgacuucuggaccgccguggucgccaucgagccccacgugaacccgguggaccgccaguacaccaucuucggggaguccaagcaguucaacguccggaacgacagcaacaaguggaaguuccuggagauguuccgcuccagcucccagaacgaguucuacaaccggcgcacccucacgagcgacacccggcuggugggcauccugaaguacggcgggcgcguguggaccuuccacggcgagaccccgcgggccacgaccgacuccagcuccaccgccaaccucaacaacaucagcaucaccauccacuccgaguucuacaucaucccccgcagccaggagagcaagugcaacgaguacaucaacaacgggcug

SEQ ID NO: 188 - RNA, 549 nt, Artificial Sequence
  derived and/or modified CDS sequence (opt1) from RVA/Wa/P[8]__AAA47290.1__VP8*(41-223)
gcccagacccgguacgcgcccgugaacugggggcacggcgagaucaacgacuccaccaccguggagcccauccucgacgggcccuaccagccgacgaccuucaccccgcccaacgacuacuggauccugaucaacagcaacaccaacggcgucguguacgaguccacgaacaacagcgacuucuggaccgccguggucgccaucgagccccacgugaaccccguggaccgccaguacaccaucuucggggaguccaagcaguucaacgucagcaacgacuccaacaaguggaaguuccuggagauguuccggagcuccagccagaacgaguucuacaaccgccggacccucacguccgacacccgcuucgugggcauccugaaguacggcgggcggguguggaccuuccacggcgagacgccccgcgccaccaccgacagcuccagcaccgccaaccugaacaacaucuccaucaccauccacagcgaguucuacaucaucccccggagccaggaguccaagugcaacgaguacaucaacaacgggcug

SEQ ID NO: 189 - RNA, 549 nt, Artificial Sequence
  derived and/or modified CDS sequence (opt1) from RVA/Wa/P[8]__AAA66953.1__VP8*(41-223)
gcccagacccgguacgcgcccgugaacugggggcacggcgagaucaacgacuccaccaccguggagcccaugcucgacgggcccuaccagccgacgaccuucaccccgcccaacgacuacuggauccugaucaacagcaacaccaacggcgucguguacgaguccacgaacaacagcgacuucuggaccgccguggucgccaucgagccccacgugaaccccguggaccgccaguacaccaucuucggggaguccaagcaguucaacgucagcaacgacuccaacaaguggaaguuccuggagauguuccggagcuccagccagaacgaguucuacaaccgccggacccucacguccgacacccgcuucgugggcauccugaaguacggcgggcggguguggaccuuccacggcgagacgccccgcgccaccaccgacagcuccagcaccgccaaccugaacaacaucuccaucaccauccacagcgaguucuacaucaucccccggagccaggaguccaagugcaacgaguacaucaacaacgggcug

SEQ ID NO: 190 - RNA, 543 nt, Artificial Sequence
  derived and/or modified CDS sequence (opt1) from RVA/BE1058/P[4]__AEX30665.1__P2_VP8*(65-223)
augcaguacaucaaggccaacagcaaguucaucggcaucaccgagcugggcagcggguccggccucgacggccccuaccagcccacgaccuucaagccgcccaacgacuacuggcugcugaucuccagcaacaccgacgggguggucuacgaguccaccaacaacagcgacuucuggacggccgugaucgccguggagccccacgucaaccagaccaaccgccaguacgugcuguucggcgagaacaagcaguucaacaucgagaacuccagcgacaaguggaaguucuucgagauguucaagggcaacucccagagcgacuucuccaaccggcgcacccugaccagcuccaaccggcugguggggaugcucaaguacggcgggcgcgucuggacguuccacggcgagaccccgcgggccaccaccgacagcuccagcacggccgaccugaacaacaucuccaucaucauccacagcgaguucuacaucaucccccgcagccaggaguccaagugcaacgaguacaucaacaacgggcuguga

SEQ ID NO: 191 - RNA, 543 nt, Artificial Sequence
  derived and/or modified CDS sequence (opt1) from RVA/DS-1/P[4]__CAD62680.1__P2_VP8*(65-223)
augcaguacaucaaggccaacagcaaguucaucggcaucaccgagcugggcagcggguccggccucgacgggcccuaccagccgacgaccuucaagccgcccaacgacuacuggcugcugaucuccagcaacaccaacggcguggucuacgaguccaccaacaacaacgacuucuggacggccgugagcuccguggagccccacgucagccagaccaaccgccaguacauccucuucggggagaacaagcaguucaacguggagaacaacuccgacaaguggaaguucuucgagaccuucaccggcagcucccagggcaacuucagcaaccggcgcacgcugaccuccagcaaccggcugguggggaugcucaaguacggcgggcgcgucuggaccuuccacggcgagacgccccgggccaccaccgacuccagcaacaccgccgaccugaacaacaucagcaucaucauccacuccgaguucuacaucaucccccgcagccaggaguccaagugcaacgaguacaucaacaacgggcuguga

SEQ ID NO: 192 - RNA, 543 nt, Artificial Sequence; identical to SEQ ID NO: 191
  derived and/or modified CDS sequence (opt1) from RVA/DS-1/P[4]__ABV53252.1__P2_VP8*(65-223)

SEQ ID NO: 193 - RNA, 543 nt, Artificial Sequence
  derived and/or modified CDS sequence (opt1) from RVA/F01322/P[6]__AFA51886.1__P2_VP8*(65-223)
augcaguacaucaaggccaacagcaaguucaucggcaucaccgagcugggcagcggguccggccucgacgggcccuaccagccgaccaacuucaagccgcccaacgacuacuggauccugcugaaccccaccaaccagcagguggugcucgagggcacgaacaagaccgacaucugggucgcccugcugcucguggagccgaacgugaccaaccagagccggcaguacacccuguucggggagacgaagcagaucaccgucgagaacaacaccaacaaguggaaguucuucgagauguuccgcuccagcguguccgccgaguuccagcacaagcggacccugacgagcgacaccaagcucgccggcuucaugaaguucuacaacuccguguggaccuuccacggcgagacccccaacgccacgaccgacuacagcuccaccagcaaccuguucgaggucgagaccgugauccacguggaguucuacaucaucccccgcucccaggagagcaagugcuccgaguacaucaacacggggcuguga

SEQ ID NO: 194 - RNA, 543 nt, Artificial Sequence
  derived and/or modified CDS sequence (opt1) from RVA/1076/P[6]__AAA47337.1__P2_VP8*(65-223)
augcaguacaucaaggccaacagcaaguucaucggcaucaccgagcugggcagcggguccggccucgacgggcccuaccagccgaccuccuucaagccgcccagcgacuacuggauccugcugaaccccaccaaccagcaggucgugcucgagggcacgaacaagaccgacaucuggguggcccugcugcucguggagcccaacgugaccaaccagucccggcaguacacccuguucggggagacgaagcagaucaccgucgagaacaacaccaacaaguggaaguucuucgagauguuccgcagcuccgugagcgccgaguuccagcacaagcggacccugacguccgacaccaagcucgccggcuuccugaaguucuacaacagcguguggaccuucuacggcgagacgccccacgccaccaccgacuacuccagcaccuccaaccugagcgaggucgagaccgcgauccacguggaguucuacaucaucccccgcucccaggagagcaagugcaacgaguacaucaacacggggcuguga

SEQ ID NO: 195 - RNA, 543 nt, Artificial Sequence
  derived and/or modified CDS sequence (opt1) from RVA/BE1128/P[8]__AEX30671.1__P2_VP8*(65-223)
augcaguacaucaaggccaacagcaaguucaucggcaucaccgagcugggcagcggguccggccucgacggcccguaccagccgacgaccuucaccccgcccaccgacuacuggauccugaucacguccaacaccaacggggugguguacgagagcaccaacaacuccgacuucuggaccgccgucaucgccguggagccccacgugaacccggucgaccgccaguacaacguguucggcgagaacaagcaguucaacgugcggaacgacagcgacaaguggaaguuccuggagauguuccgcggcuccagccagaacgacuucuacaaccggcgcacgcucaccuccgacacccggcuggucgggauccugaaguacggcgggcgcguguggaccuuccacggcgagacgccccgggccaccaccgacagcuccaacaccgccaaccucgacgggaucagcaucacgauccacuccgaguucuacaucaucccccgcagccaggaguccaagugcaacgaguacaucaacaacggccuguga

SEQ ID NO: 196 - RNA, 543 nt, Artificial Sequence
  derived and/or modified CDS sequence (opt1) from RVA/Wa-VirWa/P[8]__ACR22783.1__P2_VP8*(65-223)
augcaguacaucaaggccaacagcaaguucaucggcaucaccgagcugggcagcggguccggccucgacgggcccuaccagccgacgaccuucaccccgcccaacgacuacuggauccugaucaacagcaacaccaacggcgucguguacgaguccacgaacaacagcgacuucuggaccgccguggucgccaucgagccccacgugaacccgguggaccgccaguacaccaucuucggggaguccaagcaguucaacguccggaacgacagcaacaaguggaaguuccuggagauguuccgcuccagcucccagaacgaguucuacaaccggcgcacccucacgagcgacacccggcuggugggcauccugaaguacggcgggcgcguguggaccuuccacggcgagaccccgcgggccacgaccgacuccagcuccaccgccaaccucaacaacaucagcaucaccauccacuccgaguucuacaucaucccccgcagccaggagagcaagugcaacgaguacaucaacaacgggcuguga

SEQ ID NO: 197 - RNA, 543 nt, Artificial Sequence
  derived and/or modified CDS sequence (opt1) from RVA/Wa/P[8]__AAA47290.1__P2_VP8*(65-223)
augcaguacaucaaggccaacagcaaguucaucggcaucaccgagcugggcagcggguccggccucgacgggcccuaccagccgacgaccuucaccccgcccaacgacuacuggauccugaucaacagcaacaccaacggcgucguguacgaguccacgaacaacagcgacuucuggaccgccguggucgccaucgagccccacgugaaccccguggaccgccaguacaccaucuucggggaguccaagcaguucaacgucagcaacgacuccaacaaguggaaguuccuggagauguuccggagcuccagccagaacgaguucuacaaccgccggacccucacguccgacacccgcuucgugggcauccugaaguacggcgggcggguguggaccuuccacggcgagacgccccgcgccaccaccgacagcuccagcaccgccaaccugaacaacaucuccaucaccauccacagcgaguucuacaucaucccccggagccaggaguccaagugcaacgaguacaucaacaacgggcuguga

SEQ ID NO: 198 - RNA, 543 nt, Artificial Sequence; identical to SEQ ID NO: 197
  derived and/or modified CDS sequence (opt1) from RVA/Wa/P[8]__AAA66953.1__P2_VP8*(65-223)

SEQ ID NO: 199 - RNA, 615 nt, Artificial Sequence
  derived and/or modified CDS sequence (opt1) from RVA/BE1058/P[4]__AEX30665.1__P2_VP8*(41-223)
augcaguacaucaaggccaacagcaaguucaucggcaucaccgagcugggcagcggguccggcgcccagacccgguacgcgcccgugaacuggggccacggggagaucaacgacagcaccaccgucgagcccgugcucgacggccccuaccagcccacgaccuucaagccgcccaacgacuacuggcugcugaucuccagcaacaccgacgggguggucuacgaguccaccaacaacagcgacuucuggacggccgugaucgccguggagccccacgucaaccagaccaaccgccaguacgugcuguucggcgagaacaagcaguucaacaucgagaacuccagcgacaaguggaaguucuucgagauguucaagggcaacucccagagcgacuucuccaaccggcgcacccugaccagcuccaaccggcugguggggaugcucaaguacggcgggcgcgucuggacguuccacggcgagaccccgcgggccaccaccgacagcuccagcacggccgaccugaacaacaucuccaucaucauccacagcgaguucuacaucaucccccgcagccaggaguccaagugcaacgaguacaucaacaacgggcuguga

SEQ ID NO: 200 - RNA, 615 nt, Artificial Sequence
  derived and/or modified CDS sequence (opt1) from RVA/DS-1/P[4]__CAD62680.1__P2_VP8*(41-223)
augcaguacaucaaggccaacagcaaguucaucggcaucaccgagcugggcagcggguccggcgcccagacccgguacgcgcccgugaacuggggcuccugggagaucaacgacagcaccaccgucgagcccgugcucgacgggcccuaccagccgacgaccuucaagccgcccaacgacuacuggcugcugaucuccagcaacaccaacggcguggucuacgaguccaccaacaacaacgacuucuggacggccgugagcuccguggagccccacgucagccagaccaaccgccaguacauccucuucggggagaacaagcaguucaacguggagaacaacuccgacaaguggaaguucuucgagaccuucaccggcagcucccagggcaacuucagcaaccggcgcacgcugaccuccagcaaccggcugguggggaugcucaaguacggcgggcgcgucuggaccuuccacggcgagacgccccgggccaccaccgacuccagcaacaccgccgaccugaacaacaucagcaucaucauccacuccgaguucuacaucaucccccgcagccaggaguccaagugcaacgaguacaucaacaacgggcuguga

SEQ ID NO: 201 - RNA, 615 nt, Artificial Sequence; identical to SEQ ID NO: 200
  derived and/or modified CDS sequence (opt1) from RVA/DS-1/P[4]__ABV53252.1__P2_VP8*(41-223)

SEQ ID NO: 202 - RNA, 615 nt, Artificial Sequence
  derived and/or modified CDS sequence (opt1) from RVA/F01322/P[6]__AFA51886.1__P2_VP8*(41-223)
augcaguacaucaaggccaacagcaaguucaucggcaucaccgagcugggcagcggguccggcgcccagaccaacuacgcgcccgugaccuggagccacggcgaggugaacgacuccacgaccaucgagcccguccucgacgggcccuaccagccgaccaacuucaagccgcccaacgacuacuggauccugcugaaccccaccaaccagcagguggugcucgagggcacgaacaagaccgacaucugggucgcccugcugcucguggagccgaacgugaccaaccagagccggcaguacacccuguucggggagacgaagcagaucaccgucgagaacaacaccaacaaguggaaguucuucgagauguuccgcuccagcguguccgccgaguuccagcacaagcggacccugacgagcgacaccaagcucgccggcuucaugaaguucuacaacuccguguggaccuuccacggcgagacccccaacgccacgaccgacuacagcuccaccagcaaccuguucgaggucgagaccgugauccacguggaguucuacaucaucccccgcucccaggagagcaagugcuccgaguacaucaacacggggcuguga

SEQ ID NO: 203 - RNA, 615 nt, Artificial Sequence
  derived and/or modified CDS sequence (opt1) from RVA/1076/P[6]__AAA47337.1__P2_VP8*(41-223)
augcaguacaucaaggccaacagcaaguucaucggcaucaccgagcugggcagcggguccggcgcccagaccaacuacgcgcccgugaccuggagccacggcgaggugaacgacagcacgaccaucgagcccguccucgacgggcccuaccagccgaccuccuucaagccgcccagcgacuacuggauccugcugaaccccaccaaccagcaggucgugcucgagggcacgaacaagaccgacaucuggguggcccugcugcucguggagcccaacgugaccaaccagucccggcaguacacccuguucggggagacgaagcagaucaccgucgagaacaacaccaacaaguggaaguucuucgagauguuccgcagcuccgugagcgccgaguuccagcacaagcggacccugacguccgacaccaagcucgccggcuuccugaaguucuacaacagcguguggaccuucuacggcgagacgccccacgccaccaccgacuacuccagcaccuccaaccugagcgaggucgagaccgcgauccacguggaguucuacaucaucccccgcucccaggagagcaagugcaacgaguacaucaacacggggcuguga

SEQ ID NO: 204 - RNA, 615 nt, Artificial Sequence
  derived and/or modified CDS sequence (opt1) from RVA/BE1128/P[8]__AEX30671.1__P2_VP8*(41-223)
augcaguacaucaaggccaacagcaaguucaucggcaucaccgagcugggcagcggguccggcgcccagacccgguacgcgcccgugaacuggggccacggggagaucaacgacagcaccaccgucgagcccauccucgacggcccguaccagccgacgaccuucaccccgcccaccgacuacuggauccugaucacguccaacaccaacggggugguguacgagagcaccaacaacuccgacuucuggaccgccgucaucgccguggagccccacgugaacccggucgaccgccaguacaacguguucggcgagaacaagcaguucaacgugcggaacgacagcgacaaguggaaguuccuggagauguuccgcggcuccagccagaacgacuucuacaaccggcgcacgcucaccuccgacacccggcuggucgggauccugaaguacggcgggcgcguguggaccuuccacggcgagacgccccgggccaccaccgacagcuccaacaccgccaaccucgacgggaucagcaucacgauccacuccgaguucuacaucaucccccgcagccaggaguccaagugcaacgaguacaucaacaacggccuguga

SEQ ID NO: 205 - RNA, 615 nt, Artificial Sequence
  derived and/or modified CDS sequence (opt1) from RVA/Wa-VirWa/P[8]__ACR22783.1__P2_VP8*(41-223)
augcaguacaucaaggccaacagcaaguucaucggcaucaccgagcugggcagcggguccggcgcccagacccgguacgcgcccgugaacugggggcacggcgagaucaacgacuccaccaccguggagcccauccucgacgggcccuaccagccgacgaccuucaccccgcccaacgacuacuggauccugaucaacagcaacaccaacggcgucguguacgaguccacgaacaacagcgacuucuggaccgccguggucgccaucgagccccacgugaacccgguggaccgccaguacaccaucuucggggaguccaagcaguucaacguccggaacgacagcaacaaguggaaguuccuggagauguuccgcuccagcucccagaacgaguucuacaaccggcgcacccucacgagcgacacccggcuggugggcauccugaaguacggcgggcgcguguggaccuuccacggcgagaccccgcgggccacgaccgacuccagcuccaccgccaaccucaacaacaucagcaucaccauccacuccgaguucuacaucaucccccgcagccaggagagcaagugcaacgaguacaucaacaacgggcuguga

SEQ ID NO: 206 - RNA, 615 nt, Artificial Sequence
  derived and/or modified CDS sequence (opt1) from RVA/Wa/P[8]__AAA47290.1__P2_VP8*(41-223)
augcaguacaucaaggccaacagcaaguucaucggcaucaccgagcugggcagcggguccggcgcccagacccgguacgcgcccgugaacugggggcacggcgagaucaacgacuccaccaccguggagcccauccucgacgggcccuaccagccgacgaccuucaccccgcccaacgacuacuggauccugaucaacagcaacaccaacggcgucguguacgaguccacgaacaacagcgacuucuggaccgccguggucgccaucgagccccacgugaaccccguggaccgccaguacaccaucuucggggaguccaagcaguucaacgucagcaacgacuccaacaaguggaaguuccuggagauguuccggagcuccagccagaacgaguucuacaaccgccggacccucacguccgacacccgcuucgugggcauccugaaguacggcgggcggguguggaccuuccacggcgagacgccccgcgccaccaccgacagcuccagcaccgccaaccugaacaacaucuccaucaccauccacagcgaguucuacaucaucccccggagccaggaguccaagugcaacgaguacaucaacaacgggcuguga

SEQ ID NO: 207 - RNA, 615 nt, Artificial Sequence
  derived and/or modified CDS sequence (opt1) from RVA/Wa/P[8]__AAA66953.1__P2_VP8*(41-223)
augcaguacaucaaggccaacagcaaguucaucggcaucaccgagcugggcagcggguccggcgcccagacccgguacgcgcccgugaacugggggcacggcgagaucaacgacuccaccaccguggagcccaugcucgacgggcccuaccagccgacgaccuucaccccgcccaacgacuacuggauccugaucaacagcaacaccaacggcgucguguacgaguccacgaacaacagcgacuucuggaccgccguggucgccaucgagccccacgugaaccccguggaccgccaguacaccaucuucggggaguccaagcaguucaacgucagcaacgacuccaacaaguggaaguuccuggagauguuccggagcuccagccagaacgaguucuacaaccgccggacccucacguccgacacccgcuucgugggcauccugaaguacggcgggcggguguggaccuuccacggcgagacgccccgcgccaccaccgacagcuccagcaccgccaaccugaacaacaucuccaucaccauccacagcgaguucuacaucaucccccggagccaggaguccaagugcaacgaguacaucaacaacgggcuguga

SEQ ID NO: 208 - RNA, 1041 nt, Artificial Sequence
  derived and/or modified CDS sequence (opt1) from RVA/BE1058/P[4]__AEX30665.1__P2_VP8*(65-223)_Ferritin
augcaguacaucaaggccaacagcaaguucaucggcaucaccgagcugggcagcggguccggccucgacggccccuaccagcccacgaccuucaagccgcccaacgacuacuggcugcugaucuccagcaacaccgacgggguggucuacgaguccaccaacaacagcgacuucuggacggccgugaucgccguggagccccacgucaaccagaccaaccgccaguacgugcuguucggcgagaacaagcaguucaacaucgagaacuccagcgacaaguggaaguucuucgagauguucaagggcaacucccagagcgacuucuccaaccggcgcacccugaccagcuccaaccggcugguggggaugcucaaguacggcgggcgcgucuggacguuccacggcgagaccccgcgggccaccaccgacagcuccagcacggccgaccugaacaacaucuccaucaucauccacagcgaguucuacaucaucccccgcagccaggaguccaagugcaacgaguacaucaacaacgggcugagcggcggggacaucaucaagcuccugaacgagcaggugaacaaggagaugcaguccagcaaccuguacauguccaugagcuccuggugcuacacccacagccucgacggcgccgggcuguuccuguucgaccacgccgcggaggaguacgagcacgccaagaagcucaucaucuuccugaacgagaacaacguccccgugcagcugaccuccaucagcgccccggagcacaaguucgagggccucacgcagaucuuccagaaggccuacgagcacgagcagcacaucuccgagagcaucaacaacaucguggaccacgccaucaaguccaaggaccacgcgaccuucaacuuccugcagugguacgucgccgagcagcacgaggaggaggugcuguucaaggacauccucgacaagaucgagcugaucgggaacgagaaccacggccuguaccucgccgaccaguacgugaaggggaucgccaagagccgcaaguccuga

SEQ ID NO: 209 - RNA, 1041 nt, Artificial Sequence
  derived and/or modified CDS sequence (opt1) from RVA/DS-1/P[4]__CAD62680.1__P2_VP8*(65-223)_Ferritin
augcaguacaucaaggccaacagcaaguucaucggcaucaccgagcugggcagcggguccggccucgacgggcccuaccagccgacgaccuucaagccgcccaacgacuacuggcugcugaucuccagcaacaccaacggcguggucuacgaguccaccaacaacaacgacuucuggacggccgugagcuccguggagccccacgucagccagaccaaccgccaguacauccucuucggggagaacaagcaguucaacguggagaacaacuccgacaaguggaaguucuucgagaccuucaccggcagcucccagggcaacuucagcaaccggcgcacgcugaccuccagcaaccggcugguggggaugcucaaguacggcgggcgcgucuggaccuuccacggcgagacgccccgggccaccaccgacuccagcaacaccgccgaccugaacaacaucagcaucaucauccacuccgaguucuacaucaucccccgcagccaggaguccaagugcaacgaguacaucaacaacgggcugagcggcggggacaucaucaagcuccugaacgagcaggugaacaaggagaugcaguccagcaaccuguacauguccaugagcuccuggugcuacacccacagccucgacggcgccgggcuguuccuguucgaccacgccgcggaggaguacgagcacgccaagaagcucaucaucuuccugaacgagaacaacguccccgugcagcugaccuccaucagcgccccggagcacaaguucgagggccucacgcagaucuuccagaaggccuacgagcacgagcagcacaucuccgagagcaucaacaacaucguggaccacgccaucaaguccaaggaccacgcgaccuucaacuuccugcagugguacgucgccgagcagcacgaggaggaggugcuguucaaggacauccucgacaagaucgagcugaucgggaacgagaaccacggccuguaccucgccgaccaguacgugaaggggaucgccaagagccgcaaguccuga

SEQ ID NO: 210 - RNA, 1041 nt, Artificial Sequence; identical to SEQ ID NO: 209
  derived and/or modified CDS sequence (opt1) from RVA/DS-1/P[4]__ABV53252.1__P2_VP8*(65-223)_Ferritin

SEQ ID NO: 211 - RNA, 1041 nt, Artificial Sequence
  derived and/or modified CDS sequence (opt1) from RVA/F01322/P[6]__AFA51886.1__P2_VP8*(65-223)_Ferritin
augcaguacaucaaggccaacagcaaguucaucggcaucaccgagcugggcagcggguccggccucgacgggcccuaccagccgaccaacuucaagccgcccaacgacuacuggauccugcugaaccccaccaaccagcagguggugcucgagggcacgaacaagaccgacaucugggucgcccugcugcucguggagccgaacgugaccaaccagagccggcaguacacccuguucggggagacgaagcagaucaccgucgagaacaacaccaacaaguggaaguucuucgagauguuccgcuccagcguguccgccgaguuccagcacaagcggacccugacgagcgacaccaagcucgccggcuucaugaaguucuacaacuccguguggaccuuccacggcgagacccccaacgccacgaccgacuacagcuccaccagcaaccuguucgaggucgagaccgugauccacguggaguucuacaucaucccccgcucccaggagagcaagugcuccgaguacaucaacacggggcugagcggcggggacaucaucaagcuccugaacgagcaggugaacaaggagaugcaguccagcaaccuguacauguccaugagcuccuggugcuacacccacagccucgacggcgccgggcuguuccuguucgaccacgccgcggaggaguacgagcacgccaagaagcucaucaucuuccugaacgagaacaacguccccgugcagcugaccuccaucagcgccccggagcacaaguucgagggccucacgcagaucuuccagaaggccuacgagcacgagcagcacaucuccgagagcaucaacaacaucguggaccacgccaucaaguccaaggaccacgcgaccuucaacuuccugcagugguacgucgccgagcagcacgaggaggaggugcuguucaaggacauccucgacaagaucgagcugaucgggaacgagaaccacggccuguaccucgccgaccaguacgugaaggggaucgccaagagccgcaaguccuga

SEQ ID NO: 212 - RNA, 1041 nt, Artificial Sequence
  derived and/or modified CDS sequence (opt1) from RVA/1076/P[6]__AAA47337.1__P2_VP8*(65-223)_Ferritin
augcaguacaucaaggccaacagcaaguucaucggcaucaccgagcugggcagcggguccggccucgacgggcccuaccagccgaccuccuucaagccgcccagcgacuacuggauccugcugaaccccaccaaccagcaggucgugcucgagggcacgaacaagaccgacaucuggguggcccugcugcucguggagcccaacgugaccaaccagucccggcaguacacccuguucggggagacgaagcagaucaccgucgagaacaacaccaacaaguggaaguucuucgagauguuccgcagcuccgugagcgccgaguuccagcacaagcggacccugacguccgacaccaagcucgccggcuuccugaaguucuacaacagcguguggaccuucuacggcgagacgccccacgccaccaccgacuacuccagcaccuccaaccugagcgaggucgagaccgcgauccacguggaguucuacaucaucccccgcucccaggagagcaagugcaacgaguacaucaacacggggcugagcggcggggacaucaucaagcuccugaacgagcaggugaacaaggagaugcaguccagcaaccuguacauguccaugagcuccuggugcuacacccacagccucgacggcgccgggcuguuccuguucgaccacgccgcggaggaguacgagcacgccaagaagcucaucaucuuccugaacgagaacaacguccccgugcagcugaccuccaucagcgccccggagcacaaguucgagggccucacgcagaucuuccagaaggccuacgagcacgagcagcacaucuccgagagcaucaacaacaucguggaccacgccaucaaguccaaggaccacgcgaccuucaacuuccugcagugguacgucgccgagcagcacgaggaggaggugcuguucaaggacauccucgacaagaucgagcugaucgggaacgagaaccacggccuguaccucgccgaccaguacgugaaggggaucgccaagagccgcaaguccuga

SEQ ID NO: 213 - RNA, 1041 nt, Artificial Sequence
  derived and/or modified CDS sequence (opt1) from RVA/BE1128/P[8]__AEX30671.1__P2_VP8*(65-223)_Ferritin
augcaguacaucaaggccaacagcaaguucaucggcaucaccgagcugggcagcggguccggccucgacggcccguaccagccgacgaccuucaccccgcccaccgacuacuggauccugaucacguccaacaccaacggggugguguacgagagcaccaacaacuccgacuucuggaccgccgucaucgccguggagccccacgugaacccggucgaccgccaguacaacguguucggcgagaacaagcaguucaacgugcggaacgacagcgacaaguggaaguuccuggagauguuccgcggcuccagccagaacgacuucuacaaccggcgcacgcucaccuccgacacccggcuggucgggauccugaaguacggcgggcgcguguggaccuuccacggcgagacgccccgggccaccaccgacagcuccaacaccgccaaccucgacgggaucagcaucacgauccacuccgaguucuacaucaucccccgcagccaggaguccaagugcaacgaguacaucaacaacggccugagcggcggggacaucaucaagcuccugaacgagcaggugaacaaggagaugcaguccagcaaccuguacauguccaugagcuccuggugcuacacccacagccucgacggcgccgggcuguuccuguucgaccacgccgcggaggaguacgagcacgccaagaagcucaucaucuuccugaacgagaacaacguccccgugcagcugaccuccaucagcgccccggagcacaaguucgagggccucacgcagaucuuccagaaggccuacgagcacgagcagcacaucuccgagagcaucaacaacaucguggaccacgccaucaaguccaaggaccacgcgaccuucaacuuccugcagugguacgucgccgagcagcacgaggaggaggugcuguucaaggacauccucgacaagaucgagcugaucgggaacgagaaccacggccuguaccucgccgaccaguacgugaaggggaucgccaagagccgcaaguccuga

SEQ ID NO: 214 - RNA, 1041 nt, Artificial Sequence
  derived and/or modified CDS sequence (opt1) from RVA/Wa-VirWa/P[8]__ACR22783.1__P2_VP8*(65-223)_Ferritin
augcaguacaucaaggccaacagcaaguucaucggcaucaccgagcugggcagcggguccggccucgacgggcccuaccagccgacgaccuucaccccgcccaacgacuacuggauccugaucaacagcaacaccaacggcgucguguacgaguccacgaacaacagcgacuucuggaccgccguggucgccaucgagccccacgugaacccgguggaccgccaguacaccaucuucggggaguccaagcaguucaacguccggaacgacagcaacaaguggaaguuccuggagauguuccgcuccagcucccagaacgaguucuacaaccggcgcacccucacgagcgacacccggcuggugggcauccugaaguacggcgggcgcguguggaccuuccacggcgagaccccgcgggccacgaccgacuccagcuccaccgccaaccucaacaacaucagcaucaccauccacuccgaguucuacaucaucccccgcagccaggagagcaagugcaacgaguacaucaacaacgggcugagcggcggggacaucaucaagcuccugaacgagcaggugaacaaggagaugcaguccagcaaccuguacauguccaugagcuccuggugcuacacccacagccucgacggcgccgggcuguuccuguucgaccacgccgcggaggaguacgagcacgccaagaagcucaucaucuuccugaacgagaacaacguccccgugcagcugaccuccaucagcgccccggagcacaaguucgagggccucacgcagaucuuccagaaggccuacgagcacgagcagcacaucuccgagagcaucaacaacaucguggaccacgccaucaaguccaaggaccacgcgaccuucaacuuccugcagugguacgucgccgagcagcacgaggaggaggugcuguucaaggacauccucgacaagaucgagcugaucgggaacgagaaccacggccuguaccucgccgaccaguacgugaaggggaucgccaagagccgcaaguccuga

SEQ ID NO: 215 - RNA, 1041 nt, Artificial Sequence
  derived and/or modified CDS sequence (opt1) from RVA/Wa/P[8]__AAA47290.1__P2_VP8*(65-223)_Ferritin
augcaguacaucaaggccaacagcaaguucaucggcaucaccgagcugggcagcggguccggccucgacgggcccuaccagccgacgaccuucaccccgcccaacgacuacuggauccugaucaacagcaacaccaacggcgucguguacgaguccacgaacaacagcgacuucuggaccgccguggucgccaucgagccccacgugaaccccguggaccgccaguacaccaucuucggggaguccaagcaguucaacgucagcaacgacuccaacaaguggaaguuccuggagauguuccggagcuccagccagaacgaguucuacaaccgccggacccucacguccgacacccgcuucgugggcauccugaaguacggcgggcggguguggaccuuccacggcgagacgccccgcgccaccaccgacagcuccagcaccgccaaccugaacaacaucuccaucaccauccacagcgaguucuacaucaucccccggagccaggaguccaagugcaacgaguacaucaacaacgggcugagcggcggggacaucaucaagcuccugaacgagcaggugaacaaggagaugcaguccagcaaccuguacauguccaugagcuccuggugcuacacccacagccucgacggcgccgggcuguuccuguucgaccacgccgcggaggaguacgagcacgccaagaagcucaucaucuuccugaacgagaacaacguccccgugcagcugaccuccaucagcgccccggagcacaaguucgagggccucacgcagaucuuccagaaggccuacgagcacgagcagcacaucuccgagagcaucaacaacaucguggaccacgccaucaaguccaaggaccacgcgaccuucaacuuccugcagugguacgucgccgagcagcacgaggaggaggugcuguucaaggacauccucgacaagaucgagcugaucgggaacgagaaccacggccuguaccucgccgaccaguacgugaaggggaucgccaagagccgcaaguccuga

SEQ ID NO: 216 - RNA, 1041 nt, Artificial Sequence; identical to SEQ ID NO: 215
  derived and/or modified CDS sequence (opt1) from RVA/Wa/P[8]__AAA66953.1__P2_VP8*(65-223)_Ferritin

SEQ ID NO: 217 - RNA, 1113 nt, Artificial Sequence
  derived and/or modified CDS sequence (opt1) from RVA/BE1058/P[4]__AEX30665.1__P2_VP8*(41-223)_Ferritin
augcaguacaucaaggccaacagcaaguucaucggcaucaccgagcugggcagcggguccggcgcccagacccgguacgcgcccgugaacuggggccacggggagaucaacgacagcaccaccgucgagcccgugcucgacggccccuaccagcccacgaccuucaagccgcccaacgacuacuggcugcugaucuccagcaacaccgacgggguggucuacgaguccaccaacaacagcgacuucuggacggccgugaucgccguggagccccacgucaaccagaccaaccgccaguacgugcuguucggcgagaacaagcaguucaacaucgagaacuccagcgacaaguggaaguucuucgagauguucaagggcaacucccagagcgacuucuccaaccggcgcacccugaccagcuccaaccggcugguggggaugcucaaguacggcgggcgcgucuggacguuccacggcgagaccccgcgggccaccaccgacagcuccagcacggccgaccugaacaacaucuccaucaucauccacagcgaguucuacaucaucccccgcagccaggaguccaagugcaacgaguacaucaacaacgggcugagcggcggggacaucaucaagcuccugaacgagcaggugaacaaggagaugcaguccagcaaccuguacauguccaugagcuccuggugcuacacccacagccucgacggcgccgggcuguuccuguucgaccacgccgcggaggaguacgagcacgccaagaagcucaucaucuuccugaacgagaacaacguccccgugcagcugaccuccaucagcgccccggagcacaaguucgagggccucacgcagaucuuccagaaggccuacgagcacgagcagcacaucuccgagagcaucaacaacaucguggaccacgccaucaaguccaaggaccacgcgaccuucaacuuccugcagugguacgucgccgagcagcacgaggaggaggugcuguucaaggacauccucgacaagaucgagcugaucgggaacgagaaccacggccuguaccucgccgaccaguacgugaaggggaucgccaagagccgcaaguccuga

SEQ ID NO: 218 - RNA, 1113 nt, Artificial Sequence
  derived and/or modified CDS sequence (opt1) from RVA/DS-1/P[4]__CAD62680.1__P2_VP8*(41-223)_Ferritin
augcaguacaucaaggccaacagcaaguucaucggcaucaccgagcugggcagcggguccggcgcccagacccgguacgcgcccgugaacuggggcuccugggagaucaacgacagcaccaccgucgagcccgugcucgacgggcccuaccagccgacgaccuucaagccgcccaacgacuacuggcugcugaucuccagcaacaccaacggcguggucuacgaguccaccaacaacaacgacuucuggacggccgugagcuccguggagccccacgucagccagaccaaccgccaguacauccucuucggggagaacaagcaguucaacguggagaacaacuccgacaaguggaaguucuucgagaccuucaccggcagcucccagggcaacuucagcaaccggcgcacgcugaccuccagcaaccggcugguggggaugcucaaguacggcgggcgcgucuggaccuuccacggcgagacgccccgggccaccaccgacuccagcaacaccgccgaccugaacaacaucagcaucaucauccacuccgaguucuacaucaucccccgcagccaggaguccaagugcaacgaguacaucaacaacgggcugagcggcggggacaucaucaagcuccugaacgagcaggugaacaaggagaugcaguccagcaaccuguacauguccaugagcuccuggugcuacacccacagccucgacggcgccgggcuguuccuguucgaccacgccgcggaggaguacgagcacgccaagaagcucaucaucuuccugaacgagaacaacguccccgugcagcugaccuccaucagcgccccggagcacaaguucgagggccucacgcagaucuuccagaaggccuacgagcacgagcagcacaucuccgagagcaucaacaacaucguggaccacgccaucaaguccaaggaccacgcgaccuucaacuuccugcagugguacgucgccgagcagcacgaggaggaggugcuguucaaggacauccucgacaagaucgagcugaucgggaacgagaaccacggccuguaccucgccgaccaguacgugaaggggaucgccaagagccgcaaguccuga

SEQ ID NO: 219 - RNA, 1113 nt, Artificial Sequence; identical to SEQ ID NO: 218
  derived and/or modified CDS sequence (opt1) from RVA/DS-1/P[4]__ABV53252.1__P2_VP8*(41-223)_Ferritin

SEQ ID NO: 220 - RNA, 1113 nt, Artificial Sequence
  derived and/or modified CDS sequence (opt1) from RVA/F01322/P[6]__AFA51886.1__P2_VP8*(41-223)_Ferritin
augcaguacaucaaggccaacagcaaguucaucggcaucaccgagcugggcagcggguccggcgcccagaccaacuacgcgcccgugaccuggagccacggcgaggugaacgacuccacgaccaucgagcccguccucgacgggcccuaccagccgaccaacuucaagccgcccaacgacuacuggauccugcugaaccccaccaaccagcagguggugcucgagggcacgaacaagaccgacaucugggucgcccugcugcucguggagccgaacgugaccaaccagagccggcaguacacccuguucggggagacgaagcagaucaccgucgagaacaacaccaacaaguggaaguucuucgagauguuccgcuccagcguguccgccgaguuccagcacaagcggacccugacgagcgacaccaagcucgccggcuucaugaaguucuacaacuccguguggaccuuccacggcgagacccccaacgccacgaccgacuacagcuccaccagcaaccuguucgaggucgagaccgugauccacguggaguucuacaucaucccccgcucccaggagagcaagugcuccgaguacaucaacacggggcugagcggcggggacaucaucaagcuccugaacgagcaggugaacaaggagaugcaguccagcaaccuguacauguccaugagcuccuggugcuacacccacagccucgacggcgccgggcuguuccuguucgaccacgccgcggaggaguacgagcacgccaagaagcucaucaucuuccugaacgagaacaacguccccgugcagcugaccuccaucagcgccccggagcacaaguucgagggccucacgcagaucuuccagaaggccuacgagcacgagcagcacaucuccgagagcaucaacaacaucguggaccacgccaucaaguccaaggaccacgcgaccuucaacuuccugcagugguacgucgccgagcagcacgaggaggaggugcuguucaaggacauccucgacaagaucgagcugaucgggaacgagaaccacggccuguaccucgccgaccaguacgugaaggggaucgccaagagccgcaaguccuga

SEQ ID NO: 221 - RNA, 1113 nt, Artificial Sequence
  derived and/or modified CDS sequence (opt1) from RVA/1076/P[6]__AAA47337.1__P2_VP8*(41-223)_Ferritin
augcaguacaucaaggccaacagcaaguucaucggcaucaccgagcugggcagcggguccggcgcccagaccaacuacgcgcccgugaccuggagccacggcgaggugaacgacagcacgaccaucgagcccguccucgacgggcccuaccagccgaccuccuucaagccgcccagcgacuacuggauccugcugaaccccaccaaccagcaggucgugcucgagggcacgaacaagaccgacaucuggguggcccugcugcucguggagcccaacgugaccaaccagucccggcaguacacccuguucggggagacgaagcagaucaccgucgagaacaacaccaacaaguggaaguucuucgagauguuccgcagcuccgugagcgccgaguuccagcacaagcggacccugacguccgacaccaagcucgccggcuuccugaaguucuacaacagcguguggaccuucuacggcgagacgccccacgccaccaccgacuacuccagcaccuccaaccugagcgaggucgagaccgcgauccacguggaguucuacaucaucccccgcucccaggagagcaagugcaacgaguacaucaacacggggcugagcggcggggacaucaucaagcuccugaacgagcaggugaacaaggagaugcaguccagcaaccuguacauguccaugagcuccuggugcuacacccacagccucgacggcgccgggcuguuccuguucgaccacgccgcggaggaguacgagcacgccaagaagcucaucaucuuccugaacgagaacaacguccccgugcagcugaccuccaucagcgccccggagcacaaguucgagggccucacgcagaucuuccagaaggccuacgagcacgagcagcacaucuccgagagcaucaacaacaucguggaccacgccaucaaguccaaggaccacgcgaccuucaacuuccugcagugguacgucgccgagcagcacgaggaggaggugcuguucaaggacauccucgacaagaucgagcugaucgggaacgagaaccacggccuguaccucgccgaccaguacgugaaggggaucgccaagagccgcaaguccuga

SEQ ID NO: 222 - RNA, 1113 nt, Artificial Sequence
  derived and/or modified CDS sequence (opt1) from RVA/BE1128/P[8]__AEX30671.1__P2_VP8*(41-223)_Ferritin
augcaguacaucaaggccaacagcaaguucaucggcaucaccgagcugggcagcggguccggcgcccagacccgguacgcgcccgugaacuggggccacggggagaucaacgacagcaccaccgucgagcccauccucgacggcccguaccagccgacgaccuucaccccgcccaccgacuacuggauccugaucacguccaacaccaacggggugguguacgagagcaccaacaacuccgacuucuggaccgccgucaucgccguggagccccacgugaacccggucgaccgccaguacaacguguucggcgagaacaagcaguucaacgugcggaacgacagcgacaaguggaaguuccuggagauguuccgcggcuccagccagaacgacuucuacaaccggcgcacgcucaccuccgacacccggcuggucgggauccugaaguacggcgggcgcguguggaccuuccacggcgagacgccccgggccaccaccgacagcuccaacaccgccaaccucgacgggaucagcaucacgauccacuccgaguucuacaucaucccccgcagccaggaguccaagugcaacgaguacaucaacaacggccugagcggcggggacaucaucaagcuccugaacgagcaggugaacaaggagaugcaguccagcaaccuguacauguccaugagcuccuggugcuacacccacagccucgacggcgccgggcuguuccuguucgaccacgccgcggaggaguacgagcacgccaagaagcucaucaucuuccugaacgagaacaacguccccgugcagcugaccuccaucagcgccccggagcacaaguucgagggccucacgcagaucuuccagaaggccuacgagcacgagcagcacaucuccgagagcaucaacaacaucguggaccacgccaucaaguccaaggaccacgcgaccuucaacuuccugcagugguacgucgccgagcagcacgaggaggaggugcuguucaaggacauccucgacaagaucgagcugaucgggaacgagaaccacggccuguaccucgccgaccaguacgugaaggggaucgccaagagccgcaaguccuga

SEQ ID NO: 223 - RNA, 1113 nt, Artificial Sequence
  derived and/or modified CDS sequence (opt1) from RVA/Wa-VirWa/P[8]__ACR22783.1__P2_VP8*(41-223)_Ferritin
augcaguacaucaaggccaacagcaaguucaucggcaucaccgagcugggcagcggguccggcgcccagacccgguacgcgcccgugaacugggggcacggcgagaucaacgacuccaccaccguggagcccauccucgacgggcccuaccagccgacgaccuucaccccgcccaacgacuacuggauccugaucaacagcaacaccaacggcgucguguacgaguccacgaacaacagcgacuucuggaccgccguggucgccaucgagccccacgugaacccgguggaccgccaguacaccaucuucggggaguccaagcaguucaacguccggaacgacagcaacaaguggaaguuccuggagauguuccgcuccagcucccagaacgaguucuacaaccggcgcacccucacgagcgacacccggcuggugggcauccugaaguacggcgggcgcguguggaccuuccacggcgagaccccgcgggccacgaccgacuccagcuccaccgccaaccucaacaacaucagcaucaccauccacuccgaguucuacaucaucccccgcagccaggagagcaagugcaacgaguacaucaacaacgggcugagcggcggggacaucaucaagcuccugaacgagcaggugaacaaggagaugcaguccagcaaccuguacauguccaugagcuccuggugcuacacccacagccucgacggcgccgggcuguuccuguucgaccacgccgcggaggaguacgagcacgccaagaagcucaucaucuuccugaacgagaacaacguccccgugcagcugaccuccaucagcgccccggagcacaaguucgagggccucacgcagaucuuccagaaggccuacgagcacgagcagcacaucuccgagagcaucaacaacaucguggaccacgccaucaaguccaaggaccacgcgaccuucaacuuccugcagugguacgucgccgagcagcacgaggaggaggugcuguucaaggacauccucgacaagaucgagcugaucgggaacgagaaccacggccuguaccucgccgaccaguacgugaaggggaucgccaagagccgcaaguccuga

SEQ ID NO: 224 - RNA, 1113 nt, Artificial Sequence
  derived and/or modified CDS sequence (opt1) from RVA/Wa/P[8]__AAA47290.1__P2_VP8*(41-223)_Ferritin
augcaguacaucaaggccaacagcaaguucaucggcaucaccgagcugggcagcggguccggcgcccagacccgguacgcgcccgugaacugggggcacggcgagaucaacgacuccaccaccguggagcccauccucgacgggcccuaccagccgacgaccuucaccccgcccaacgacuacuggauccugaucaacagcaacaccaacggcgucguguacgaguccacgaacaacagcgacuucuggaccgccguggucgccaucgagccccacgugaaccccguggaccgccaguacaccaucuucggggaguccaagcaguucaacgucagcaacgacuccaacaaguggaaguuccuggagauguuccggagcuccagccagaacgaguucuacaaccgccggacccucacguccgacacccgcuucgugggcauccugaaguacggcgggcggguguggaccuuccacggcgagacgccccgcgccaccaccgacagcuccagcaccgccaaccugaacaacaucuccaucaccauccacagcgaguucuacaucaucccccggagccaggaguccaagugcaacgaguacaucaacaacgggcugagcggcggggacaucaucaagcuccugaacgagcaggugaacaaggagaugcaguccagcaaccuguacauguccaugagcuccuggugcuacacccacagccucgacggcgccgggcuguuccuguucgaccacgccgcggaggaguacgagcacgccaagaagcucaucaucuuccugaacgagaacaacguccccgugcagcugaccuccaucagcgccccggagcacaaguucgagggccucacgcagaucuuccagaaggccuacgagcacgagcagcacaucuccgagagcaucaacaacaucguggaccacgccaucaaguccaaggaccacgcgaccuucaacuuccugcagugguacgucgccgagcagcacgaggaggaggugcuguucaaggacauccucgacaagaucgagcugaucgggaacgagaaccacggccuguaccucgccgaccaguacgugaaggggaucgccaagagccgcaaguccuga

SEQ ID NO: 225 - RNA, 1113 nt, Artificial Sequence
  derived and/or modified CDS sequence (opt1) from RVA/Wa/P[8]__AAA66953.1__P2_VP8*(41-223)_Ferritin
augcaguacaucaaggccaacagcaaguucaucggcaucaccgagcugggcagcggguccggcgcccagacccgguacgcgcccgugaacugggggcacggcgagaucaacgacuccaccaccguggagcccaugcucgacgggcccuaccagccgacgaccuucaccccgcccaacgacuacuggauccugaucaacagcaacaccaacggcgucguguacgaguccacgaacaacagcgacuucuggaccgccguggucgccaucgagccccacgugaaccccguggaccgccaguacaccaucuucggggaguccaagcaguucaacgucagcaacgacuccaacaaguggaaguuccuggagauguuccggagcuccagccagaacgaguucuacaaccgccggacccucacguccgacacccgcuucgugggcauccugaaguacggcgggcggguguggaccuuccacggcgagacgccccgcgccaccaccgacagcuccagcaccgccaaccugaacaacaucuccaucaccauccacagcgaguucuacaucaucccccggagccaggaguccaagugcaacgaguacaucaacaacgggcugagcggcggggacaucaucaagcuccugaacgagcaggugaacaaggagaugcaguccagcaaccuguacauguccaugagcuccuggugcuacacccacagccucgacggcgccgggcuguuccuguucgaccacgccgcggaggaguacgagcacgccaagaagcucaucaucuuccugaacgagaacaacguccccgugcagcugaccuccaucagcgccccggagcacaaguucgagggccucacgcagaucuuccagaaggccuacgagcacgagcagcacaucuccgagagcaucaacaacaucguggaccacgccaucaaguccaaggaccacgcgaccuucaacuuccugcagugguacgucgccgagcagcacgaggaggaggugcuguucaaggacauccucgacaagaucgagcugaucgggaacgagaaccacggccuguaccucgccgaccaguacgugaaggggaucgccaagagccgcaaguccuga

SEQ ID NO: 226 - RNA, 1047 nt, Artificial Sequence
  derived and/or modified CDS sequence (opt1) from RVA/BE1058/P[4]__AEX30665.1__LumSynt_P2_VP8*(65-223)
augcagaucuacgagggcaagcugaccgccgaggggcuccgcuucggcaucguggccagccgguucaaccacgcgcuggucgaccgccugguggagggggccaucgacgccaucgugcggcacggcgggcgcgaggaggacaucacccucguccgggugcccggcuccugggagaucccgguggccgccggcgagcuggcccgcaaggaggacaucgacgcggucaucgccaucggggugcugauccggggcgccacgccccacuucgacuacaucgccagcgagguguccaaggggcucgcggaccugagccuggagcuccgcaagcccaucaccuucggcgucaucaccgccgacacccuggagcaggccaucgagcgggccgggacgaagcacggcaacaagggcugggaggccgcgcuguccgccaucgagauggccaaccucuucaagagccugcgcggcgggagcggcggguccggcgggagcggcggcuccgggggcgggcaguacaucaaggccaacagcaaguucaucggcaucaccgagcugggcagcggguccggccucgacggccccuaccagcccacgaccuucaagccgcccaacgacuacuggcugcugaucuccagcaacaccgacgggguggucuacgaguccaccaacaacagcgacuucuggacggccgugaucgccguggagccccacgucaaccagaccaaccgccaguacgugcuguucggcgagaacaagcaguucaacaucgagaacuccagcgacaaguggaaguucuucgagauguucaagggcaacucccagagcgacuucuccaaccggcgcacccugaccagcuccaaccggcugguggggaugcucaaguacggcgggcgcgucuggacguuccacggcgagaccccgcgggccaccaccgacagcuccagcacggccgaccugaacaacaucuccaucaucauccacagcgaguucuacaucaucccccgcagccaggaguccaagugcaacgaguacaucaacaacgggcuguga

SEQ ID NO: 227 - RNA, 1047 nt, Artificial Sequence
  derived and/or modified CDS sequence (opt1) from RVA/DS-1/P[4]__CAD62680.1__LumSynt_P2_VP8*(65-223)
augcagaucuacgagggcaagcugaccgccgaggggcuccgcuucggcaucguggccagccgguucaaccacgcgcuggucgaccgccugguggagggggccaucgacgccaucgugcggcacggcgggcgcgaggaggacaucacccucguccgggugcccggcuccugggagaucccgguggccgccggcgagcuggcccgcaaggaggacaucgacgcggucaucgccaucggggugcugauccggggcgccacgccccacuucgacuacaucgccagcgagguguccaaggggcucgcggaccugagccuggagcuccgcaagcccaucaccuucggcgucaucaccgccgacacccuggagcaggccaucgagcgggccgggacgaagcacggcaacaagggcugggaggccgcgcuguccgccaucgagauggccaaccucuucaagagccugcgcggcgggagcggcggguccggcgggagcggcggcuccgggggcgggcaguacaucaaggccaacagcaaguucaucggcaucaccgagcugggcagcggguccggccucgacgggcccuaccagccgacgaccuucaagccgcccaacgacuacuggcugcugaucuccagcaacaccaacggcguggucuacgaguccaccaacaacaacgacuucuggacggccgugagcuccguggagccccacgucagccagaccaaccgccaguacauccucuucggggagaacaagcaguucaacguggagaacaacuccgacaaguggaaguucuucgagaccuucaccggcagcucccagggcaacuucagcaaccggcgcacgcugaccuccagcaaccggcugguggggaugcucaaguacggcgggcgcgucuggaccuuccacggcgagacgccccgggccaccaccgacuccagcaacaccgccgaccugaacaacaucagcaucaucauccacuccgaguucuacaucaucccccgcagccaggaguccaagugcaacgaguacaucaacaacgggcuguga

SEQ ID NO: 228 - RNA, 1047 nt, Artificial Sequence; identical to SEQ ID NO: 227
  derived and/or modified CDS sequence (opt1) from RVA/DS-1/P[4]__ABV53252.1__LumSynt_P2_VP8*(65-223)

SEQ ID NO: 229 - RNA, 1047 nt, Artificial Sequence
  derived and/or modified CDS sequence (opt1) from RVA/F01322/P[6]__AFA51886.1__LumSynt_P2_VP8*(65-223)
augcagaucuacgagggcaagcugaccgccgaggggcuccgcuucggcaucguggccagccgguucaaccacgcgcuggucgaccgccugguggagggggccaucgacgccaucgugcggcacggcgggcgcgaggaggacaucacccucguccgggugcccggcuccugggagaucccgguggccgccggcgagcuggcccgcaaggaggacaucgacgcggucaucgccaucggggugcugauccggggcgccacgccccacuucgacuacaucgccagcgagguguccaaggggcucgcggaccugagccuggagcuccgcaagcccaucaccuucggcgucaucaccgccgacacccuggagcaggccaucgagcgggccgggacgaagcacggcaacaagggcugggaggccgcgcuguccgccaucgagauggccaaccucuucaagagccugcgcggcgggagcggcggguccggcgggagcggcggcuccgggggcgggcaguacaucaaggccaacagcaaguucaucggcaucaccgagcugggcagcggguccggccucgacgggcccuaccagccgaccaacuucaagccgcccaacgacuacuggauccugcugaaccccaccaaccagcagguggugcucgagggcacgaacaagaccgacaucugggucgcccugcugcucguggagccgaacgugaccaaccagagccggcaguacacccuguucggggagacgaagcagaucaccgucgagaacaacaccaacaaguggaaguucuucgagauguuccgcuccagcguguccgccgaguuccagcacaagcggacccugacgagcgacaccaagcucgccggcuucaugaaguucuacaacuccguguggaccuuccacggcgagacccccaacgccacgaccgacuacagcuccaccagcaaccuguucgaggucgagaccgugauccacguggaguucuacaucaucccccgcucccaggagagcaagugcuccgaguacaucaacacggggcuguga

SEQ ID NO: 230 - RNA, 1047 nt, Artificial Sequence
  derived and/or modified CDS sequence (opt1) from RVA/1076/P[6]__AAA47337.1__LumSynt_P2_VP8*(65-223)
augcagaucuacgagggcaagcugaccgccgaggggcuccgcuucggcaucguggccagccgguucaaccacgcgcuggucgaccgccugguggagggggccaucgacgccaucgugcggcacggcgggcgcgaggaggacaucacccucguccgggugcccggcuccugggagaucccgguggccgccggcgagcuggcccgcaaggaggacaucgacgcggucaucgccaucggggugcugauccggggcgccacgccccacuucgacuacaucgccagcgagguguccaaggggcucgcggaccugagccuggagcuccgcaagcccaucaccuucggcgucaucaccgccgacacccuggagcaggccaucgagcgggccgggacgaagcacggcaacaagggcugggaggccgcgcuguccgccaucgagauggccaaccucuucaagagccugcgcggcgggagcggcggguccggcgggagcggcggcuccgggggcgggcaguacaucaaggccaacagcaaguucaucggcaucaccgagcugggcagcggguccggccucgacgggcccuaccagccgaccuccuucaagccgcccagcgacuacuggauccugcugaaccccaccaaccagcaggucgugcucgagggcacgaacaagaccgacaucuggguggcccugcugcucguggagcccaacgugaccaaccagucccggcaguacacccuguucggggagacgaagcagaucaccgucgagaacaacaccaacaaguggaaguucuucgagauguuccgcagcuccgugagcgccgaguuccagcacaagcggacccugacguccgacaccaagcucgccggcuuccugaaguucuacaacagcguguggaccuucuacggcgagacgccccacgccaccaccgacuacuccagcaccuccaaccugagcgaggucgagaccgcgauccacguggaguucuacaucaucccccgcucccaggagagcaagugcaacgaguacaucaacacggggcuguga

SEQ ID NO: 231 - RNA, 1047 nt, Artificial Sequence
  derived and/or modified CDS sequence (opt1) from RVA/BE1128/P[8]__AEX30671.1__LumSynt_P2_VP8*(65-223)
augcagaucuacgagggcaagcugaccgccgaggggcuccgcuucggcaucguggccagccgguucaaccacgcgcuggucgaccgccugguggagggggccaucgacgccaucgugcggcacggcgggcgcgaggaggacaucacccucguccgggugcccggcuccugggagaucccgguggccgccggcgagcuggcccgcaaggaggacaucgacgcggucaucgccaucggggugcugauccggggcgccacgccccacuucgacuacaucgccagcgagguguccaaggggcucgcggaccugagccuggagcuccgcaagcccaucaccuucggcgucaucaccgccgacacccuggagcaggccaucgagcgggccgggacgaagcacggcaacaagggcugggaggccgcgcuguccgccaucgagauggccaaccucuucaagagccugcgcggcgggagcggcggguccggcgggagcggcggcuccgggggcgggcaguacaucaaggccaacagcaaguucaucggcaucaccgagcugggcagcggguccggccucgacggcccguaccagccgacgaccuucaccccgcccaccgacuacuggauccugaucacguccaacaccaacggggugguguacgagagcaccaacaacuccgacuucuggaccgccgucaucgccguggagccccacgugaacccggucgaccgccaguacaacguguucggcgagaacaagcaguucaacgugcggaacgacagcgacaaguggaaguuccuggagauguuccgcggcuccagccagaacgacuucuacaaccggcgcacgcucaccuccgacacccggcuggucgggauccugaaguacggcgggcgcguguggaccuuccacggcgagacgccccgggccaccaccgacagcuccaacaccgccaaccucgacgggaucagcaucacgauccacuccgaguucuacaucaucccccgcagccaggaguccaagugcaacgaguacaucaacaacggccuguga

SEQ ID NO: 232 - RNA, 1047 nt, Artificial Sequence
  derived and/or modified CDS sequence (opt1) from RVA/Wa-VirWa/P[8]__ACR22783.1__LumSynt_P2_VP8*(65-223)
augcagaucuacgagggcaagcugaccgccgaggggcuccgcuucggcaucguggccagccgguucaaccacgcgcuggucgaccgccugguggagggggccaucgacgccaucgugcggcacggcgggcgcgaggaggacaucacccucguccgggugcccggcuccugggagaucccgguggccgccggcgagcuggcccgcaaggaggacaucgacgcggucaucgccaucggggugcugauccggggcgccacgccccacuucgacuacaucgccagcgagguguccaaggggcucgcggaccugagccuggagcuccgcaagcccaucaccuucggcgucaucaccgccgacacccuggagcaggccaucgagcgggccgggacgaagcacggcaacaagggcugggaggccgcgcuguccgccaucgagauggccaaccucuucaagagccugcgcggcgggagcggcggguccggcgggagcggcggcuccgggggcgggcaguacaucaaggccaacagcaaguucaucggcaucaccgagcugggcagcggguccggccucgacgggcccuaccagccgacgaccuucaccccgcccaacgacuacuggauccugaucaacagcaacaccaacggcgucguguacgaguccacgaacaacagcgacuucuggaccgccguggucgccaucgagccccacgugaacccgguggaccgccaguacaccaucuucggggaguccaagcaguucaacguccggaacgacagcaacaaguggaaguuccuggagauguuccgcuccagcucccagaacgaguucuacaaccggcgcacccucacgagcgacacccggcuggugggcauccugaaguacggcgggcgcguguggaccuuccacggcgagaccccgcgggccacgaccgacuccagcuccaccgccaaccucaacaacaucagcaucaccauccacuccgaguucuacaucaucccccgcagccaggagagcaagugcaacgaguacaucaacaacgggcuguga

SEQ ID NO: 233 - RNA, 1047 nt, Artificial Sequence
  derived and/or modified CDS sequence (opt1) from RVA/Wa/P[8]__AAA47290.1__LumSynt_P2_VP8*(65-223)
augcagaucuacgagggcaagcugaccgccgaggggcuccgcuucggcaucguggccagccgguucaaccacgcgcuggucgaccgccugguggagggggccaucgacgccaucgugcggcacggcgggcgcgaggaggacaucacccucguccgggugcccggcuccugggagaucccgguggccgccggcgagcuggcccgcaaggaggacaucgacgcggucaucgccaucggggugcugauccggggcgccacgccccacuucgacuacaucgccagcgagguguccaaggggcucgcggaccugagccuggagcuccgcaagcccaucaccuucggcgucaucaccgccgacacccuggagcaggccaucgagcgggccgggacgaagcacggcaacaagggcugggaggccgcgcuguccgccaucgagauggccaaccucuucaagagccugcgcggcgggagcggcggguccggcgggagcggcggcuccgggggcgggcaguacaucaaggccaacagcaaguucaucggcaucaccgagcugggcagcggguccggccucgacgggcccuaccagccgacgaccuucaccccgcccaacgacuacuggauccugaucaacagcaacaccaacggcgucguguacgaguccacgaacaacagcgacuucuggaccgccguggucgccaucgagccccacgugaaccccguggaccgccaguacaccaucuucggggaguccaagcaguucaacgucagcaacgacuccaacaaguggaaguuccuggagauguuccggagcuccagccagaacgaguucuacaaccgccggacccucacguccgacacccgcuucgugggcauccugaaguacggcgggcggguguggaccuuccacggcgagacgccccgcgccaccaccgacagcuccagcaccgccaaccugaacaacaucuccaucaccauccacagcgaguucuacaucaucccccggagccaggaguccaagugcaacgaguacaucaacaacgggcuguga

SEQ ID NO: 234 - RNA, 1047 nt, Artificial Sequence; identical to SEQ ID NO: 233
  derived and/or modified CDS sequence (opt1) from RVA/Wa/P[8]__AAA66953.1__LumSynt_P2_VP8*(65-223)

SEQ ID NO: 235 - RNA, 1119 nt, Artificial Sequence
  derived and/or modified CDS sequence (opt1) from RVA/BE1058/P[4]__AEX30665.1__LumSynt_P2_VP8*(41-223)
augcagaucuacgagggcaagcugaccgccgaggggcuccgcuucggcaucguggccagccgguucaaccacgcgcuggucgaccgccugguggagggggccaucgacgccaucgugcggcacggcgggcgcgaggaggacaucacccucguccgggugcccggcuccugggagaucccgguggccgccggcgagcuggcccgcaaggaggacaucgacgcggucaucgccaucggggugcugauccggggcgccacgccccacuucgacuacaucgccagcgagguguccaaggggcucgcggaccugagccuggagcuccgcaagcccaucaccuucggcgucaucaccgccgacacccuggagcaggccaucgagcgggccgggacgaagcacggcaacaagggcugggaggccgcgcuguccgccaucgagauggccaaccucuucaagagccugcgcggcgggagcggcggguccggcgggagcggcggcuccgggggcgggcaguacaucaaggccaacagcaaguucaucggcaucaccgagcugggcagcggguccggcgcccagacccgguacgcgcccgugaacuggggccacggggagaucaacgacagcaccaccgucgagcccgugcucgacggccccuaccagcccacgaccuucaagccgcccaacgacuacuggcugcugaucuccagcaacaccgacgggguggucuacgaguccaccaacaacagcgacuucuggacggccgugaucgccguggagccccacgucaaccagaccaaccgccaguacgugcuguucggcgagaacaagcaguucaacaucgagaacuccagcgacaaguggaaguucuucgagauguucaagggcaacucccagagcgacuucuccaaccggcgcacccugaccagcuccaaccggcugguggggaugcucaaguacggcgggcgcgucuggacguuccacggcgagaccccgcgggccaccaccgacagcuccagcacggccgaccugaacaacaucuccaucaucauccacagcgaguucuacaucaucccccgcagccaggaguccaagugcaacgaguacaucaacaacgggcuguga

SEQ ID NO: 236 - RNA, 1119 nt, Artificial Sequence
  derived and/or modified CDS sequence (opt1) from RVA/DS-1/P[4]__CAD62680.1__LumSynt_P2_VP8*(41-223)
augcagaucuacgagggcaagcugaccgccgaggggcuccgcuucggcaucguggccagccgguucaaccacgcgcuggucgaccgccugguggagggggccaucgacgccaucgugcggcacggcgggcgcgaggaggacaucacccucguccgggugcccggcuccugggagaucccgguggccgccggcgagcuggcccgcaaggaggacaucgacgcggucaucgccaucggggugcugauccggggcgccacgccccacuucgacuacaucgccagcgagguguccaaggggcucgcggaccugagccuggagcuccgcaagcccaucaccuucggcgucaucaccgccgacacccuggagcaggccaucgagcgggccgggacgaagcacggcaacaagggcugggaggccgcgcuguccgccaucgagauggccaaccucuucaagagccugcgcggcgggagcggcggguccggcgggagcggcggcuccgggggcgggcaguacaucaaggccaacagcaaguucaucggcaucaccgagcugggcagcggguccggcgcccagacccgguacgcgcccgugaacuggggcuccugggagaucaacgacagcaccaccgucgagcccgugcucgacgggcccuaccagccgacgaccuucaagccgcccaacgacuacuggcugcugaucuccagcaacaccaacggcguggucuacgaguccaccaacaacaacgacuucuggacggccgugagcuccguggagccccacgucagccagaccaaccgccaguacauccucuucggggagaacaagcaguucaacguggagaacaacuccgacaaguggaaguucuucgagaccuucaccggcagcucccagggcaacuucagcaaccggcgcacgcugaccuccagcaaccggcugguggggaugcucaaguacggcgggcgcgucuggaccuuccacggcgagacgccccgggccaccaccgacuccagcaacaccgccgaccugaacaacaucagcaucaucauccacuccgaguucuacaucaucccccgcagccaggaguccaagugcaacgaguacaucaacaacgggcuguga

SEQ ID NO: 237 - RNA, 1119 nt, Artificial Sequence; identical to SEQ ID NO: 236
  derived and/or modified CDS sequence (opt1) from RVA/DS-1/P[4]__ABV53252.1__LumSynt_P2_VP8*(41-223)

SEQ ID NO: 238 - RNA, 1119 nt, Artificial Sequence
  derived and/or modified CDS sequence (opt1) from RVA/F01322/P[6]__AFA51886.1__LumSynt_P2_VP8*(41-223)
augcagaucuacgagggcaagcugaccgccgaggggcuccgcuucggcaucguggccagccgguucaaccacgcgcuggucgaccgccugguggagggggccaucgacgccaucgugcggcacggcgggcgcgaggaggacaucacccucguccgggugcccggcuccugggagaucccgguggccgccggcgagcuggcccgcaaggaggacaucgacgcggucaucgccaucggggugcugauccggggcgccacgccccacuucgacuacaucgccagcgagguguccaaggggcucgcggaccugagccuggagcuccgcaagcccaucaccuucggcgucaucaccgccgacacccuggagcaggccaucgagcgggccgggacgaagcacggcaacaagggcugggaggccgcgcuguccgccaucgagauggccaaccucuucaagagccugcgcggcgggagcggcggguccggcgggagcggcggcuccgggggcgggcaguacaucaaggccaacagcaaguucaucggcaucaccgagcugggcagcggguccggcgcccagaccaacuacgcgcccgugaccuggagccacggcgaggugaacgacuccacgaccaucgagcccguccucgacgggcccuaccagccgaccaacuucaagccgcccaacgacuacuggauccugcugaaccccaccaaccagcagguggugcucgagggcacgaacaagaccgacaucugggucgcccugcugcucguggagccgaacgugaccaaccagagccggcaguacacccuguucggggagacgaagcagaucaccgucgagaacaacaccaacaaguggaaguucuucgagauguuccgcuccagcguguccgccgaguuccagcacaagcggacccugacgagcgacaccaagcucgccggcuucaugaaguucuacaacuccguguggaccuuccacggcgagacccccaacgccacgaccgacuacagcuccaccagcaaccuguucgaggucgagaccgugauccacguggaguucuacaucaucccccgcucccaggagagcaagugcuccgaguacaucaacacggggcuguga

SEQ ID NO: 239 - RNA, 1119 nt, Artificial Sequence
  derived and/or modified CDS sequence (opt1) from RVA/1076/P[6]__AAA47337.1__LumSynt_P2_VP8*(41-223)
augcagaucuacgagggcaagcugaccgccgaggggcuccgcuucggcaucguggccagccgguucaaccacgcgcuggucgaccgccugguggagggggccaucgacgccaucgugcggcacggcgggcgcgaggaggacaucacccucguccgggugcccggcuccugggagaucccgguggccgccggcgagcuggcccgcaaggaggacaucgacgcggucaucgccaucggggugcugauccggggcgccacgccccacuucgacuacaucgccagcgagguguccaaggggcucgcggaccugagccuggagcuccgcaagcccaucaccuucggcgucaucaccgccgacacccuggagcaggccaucgagcgggccgggacgaagcacggcaacaagggcugggaggccgcgcuguccgccaucgagauggccaaccucuucaagagccugcgcggcgggagcggcggguccggcgggagcggcggcuccgggggcgggcaguacaucaaggccaacagcaaguucaucggcaucaccgagcugggcagcggguccggcgcccagaccaacuacgcgcccgugaccuggagccacggcgaggugaacgacagcacgaccaucgagcccguccucgacgggcccuaccagccgaccuccuucaagccgcccagcgacuacuggauccugcugaaccccaccaaccagcaggucgugcucgagggcacgaacaagaccgacaucuggguggcccugcugcucguggagcccaacgugaccaaccagucccggcaguacacccuguucggggagacgaagcagaucaccgucgagaacaacaccaacaaguggaaguucuucgagauguuccgcagcuccgugagcgccgaguuccagcacaagcggacccugacguccgacaccaagcucgccggcuuccugaaguucuacaacagcguguggaccuucuacggcgagacgccccacgccaccaccgacuacuccagcaccuccaaccugagcgaggucgagaccgcgauccacguggaguucuacaucaucccccgcucccaggagagcaagugcaacgaguacaucaacacggggcuguga

SEQ ID NO: 240 - RNA, 1119 nt, Artificial Sequence
  derived and/or modified CDS sequence (opt1) from RVA/BE1128/P[8]__AEX30671.1__LumSynt_P2_VP8*(41-223)
augcagaucuacgagggcaagcugaccgccgaggggcuccgcuucggcaucguggccagccgguucaaccacgcgcuggucgaccgccugguggagggggccaucgacgccaucgugcggcacggcgggcgcgaggaggacaucacccucguccgggugcccggcuccugggagaucccgguggccgccggcgagcuggcccgcaaggaggacaucgacgcggucaucgccaucggggugcugauccggggcgccacgccccacuucgacuacaucgccagcgagguguccaaggggcucgcggaccugagccuggagcuccgcaagcccaucaccuucggcgucaucaccgccgacacccuggagcaggccaucgagcgggccgggacgaagcacggcaacaagggcugggaggccgcgcuguccgccaucgagauggccaaccucuucaagagccugcgcggcgggagcggcggguccggcgggagcggcggcuccgggggcgggcaguacaucaaggccaacagcaaguucaucggcaucaccgagcugggcagcggguccggcgcccagacccgguacgcgcccgugaacuggggccacggggagaucaacgacagcaccaccgucgagcccauccucgacggcccguaccagccgacgaccuucaccccgcccaccgacuacuggauccugaucacguccaacaccaacggggugguguacgagagcaccaacaacuccgacuucuggaccgccgucaucgccguggagccccacgugaacccggucgaccgccaguacaacguguucggcgagaacaagcaguucaacgugcggaacgacagcgacaaguggaaguuccuggagauguuccgcggcuccagccagaacgacuucuacaaccggcgcacgcucaccuccgacacccggcuggucgggauccugaaguacggcgggcgcguguggaccuuccacggcgagacgccccgggccaccaccgacagcuccaacaccgccaaccucgacgggaucagcaucacgauccacuccgaguucuacaucaucccccgcagccaggaguccaagugcaacgaguacaucaacaacggccuguga

SEQ ID NO: 241 - RNA, 1119 nt, Artificial Sequence
  derived and/or modified CDS sequence (opt1) from RVA/Wa-VirWa/P[8]__ACR22783.1__LumSynt_P2_VP8*(41-223)
augcagaucuacgagggcaagcugaccgccgaggggcuccgcuucggcaucguggccagccgguucaaccacgcgcuggucgaccgccugguggagggggccaucgacgccaucgugcggcacggcgggcgcgaggaggacaucacccucguccgggugcccggcuccugggagaucccgguggccgccggcgagcuggcccgcaaggaggacaucgacgcggucaucgccaucggggugcugauccggggcgccacgccccacuucgacuacaucgccagcgagguguccaaggggcucgcggaccugagccuggagcuccgcaagcccaucaccuucggcgucaucaccgccgacacccuggagcaggccaucgagcgggccgggacgaagcacggcaacaagggcugggaggccgcgcuguccgccaucgagauggccaaccucuucaagagccugcgcggcgggagcggcggguccggcgggagcggcggcuccgggggcgggcaguacaucaaggccaacagcaaguucaucggcaucaccgagcugggcagcggguccggcgcccagacccgguacgcgcccgugaacugggggcacggcgagaucaacgacuccaccaccguggagcccauccucgacgggcccuaccagccgacgaccuucaccccgcccaacgacuacuggauccugaucaacagcaacaccaacggcgucguguacgaguccacgaacaacagcgacuucuggaccgccguggucgccaucgagccccacgugaacccgguggaccgccaguacaccaucuucggggaguccaagcaguucaacguccggaacgacagcaacaaguggaaguuccuggagauguuccgcuccagcucccagaacgaguucuacaaccggcgcacccucacgagcgacacccggcuggugggcauccugaaguacggcgggcgcguguggaccuuccacggcgagaccccgcgggccacgaccgacuccagcuccaccgccaaccucaacaacaucagcaucaccauccacuccgaguucuacaucaucccccgcagccaggagagcaagugcaacgaguacaucaacaacgggcuguga

SEQ ID NO: 242 - RNA, 1119 nt, Artificial Sequence
  derived and/or modified CDS sequence (opt1) from RVA/Wa/P[8]__AAA47290.1__LumSynt_P2_VP8*(41-223)
augcagaucuacgagggcaagcugaccgccgaggggcuccgcuucggcaucguggccagccgguucaaccacgcgcuggucgaccgccugguggagggggccaucgacgccaucgugcggcacggcgggcgcgaggaggacaucacccucguccgggugcccggcuccugggagaucccgguggccgccggcgagcuggcccgcaaggaggacaucgacgcggucaucgccaucggggugcugauccggggcgccacgccccacuucgacuacaucgccagcgagguguccaaggggcucgcggaccugagccuggagcuccgcaagcccaucaccuucggcgucaucaccgccgacacccuggagcaggccaucgagcgggccgggacgaagcacggcaacaagggcugggaggccgcgcuguccgccaucgagauggccaaccucuucaagagccugcgcggcgggagcggcggguccggcgggagcggcggcuccgggggcgggcaguacaucaaggccaacagcaaguucaucggcaucaccgagcugggcagcggguccggcgcccagacccgguacgcgcccgugaacugggggcacggcgagaucaacgacuccaccaccguggagcccauccucgacgggcccuaccagccgacgaccuucaccccgcccaacgacuacuggauccugaucaacagcaacaccaacggcgucguguacgaguccacgaacaacagcgacuucuggaccgccguggucgccaucgagccccacgugaaccccguggaccgccaguacaccaucuucggggaguccaagcaguucaacgucagcaacgacuccaacaaguggaaguuccuggagauguuccggagcuccagccagaacgaguucuacaaccgccggacccucacguccgacacccgcuucgugggcauccugaaguacggcgggcggguguggaccuuccacggcgagacgccccgcgccaccaccgacagcuccagcaccgccaaccugaacaacaucuccaucaccauccacagcgaguucuacaucaucccccggagccaggaguccaagugcaacgaguacaucaacaacgggcuguga

SEQ ID NO: 243 - RNA, 1119 nt, Artificial Sequence
  derived and/or modified CDS sequence (opt1) from RVA/Wa/P[8]__AAA66953.1__LumSynt_P2_VP8*(41-223)
augcagaucuacgagggcaagcugaccgccgaggggcuccgcuucggcaucguggccagccgguucaaccacgcgcuggucgaccgccugguggagggggccaucgacgccaucgugcggcacggcgggcgcgaggaggacaucacccucguccgggugcccggcuccugggagaucccgguggccgccggcgagcuggcccgcaaggaggacaucgacgcggucaucgccaucggggugcugauccggggcgccacgccccacuucgacuacaucgccagcgagguguccaaggggcucgcggaccugagccuggagcuccgcaagcccaucaccuucggcgucaucaccgccgacacccuggagcaggccaucgagcgggccgggacgaagcacggcaacaagggcugggaggccgcgcuguccgccaucgagauggccaaccucuucaagagccugcgcggcgggagcggcggguccggcgggagcggcggcuccgggggcgggcaguacaucaaggccaacagcaaguucaucggcaucaccgagcugggcagcggguccggcgcccagacccgguacgcgcccgugaacugggggcacggcgagaucaacgacuccaccaccguggagcccaugcucgacgggcccuaccagccgacgaccuucaccccgcccaacgacuacuggauccugaucaacagcaacaccaacggcgucguguacgaguccacgaacaacagcgacuucuggaccgccguggucgccaucgagccccacgugaaccccguggaccgccaguacaccaucuucggggaguccaagcaguucaacgucagcaacgacuccaacaaguggaaguuccuggagauguuccggagcuccagccagaacgaguucuacaaccgccggacccucacguccgacacccgcuucgugggcauccugaaguacggcgggcggguguggaccuuccacggcgagacgccccgcgccaccaccgacagcuccagcaccgccaaccugaacaacaucuccaucaccauccacagcgaguucuacaucaucccccggagccaggaguccaagugcaacgaguacaucaacaacgggcuguga

SEQ ID NO: 244 - RNA, 594 nt, Artificial Sequence
  derived and/or modified CDS sequence (opt1) from RVA/BE1058/P[4]__AEX30665.1__SP-IgE_P2_VP8*(65-223)
auggacuggaccuggauccuguuccucguggccgccgcgacccgcguccacagccaguacaucaaggccaacagcaaguucaucggcaucaccgagcugggcagcggguccggccucgacggccccuaccagcccacgaccuucaagccgcccaacgacuacuggcugcugaucuccagcaacaccgacgggguggucuacgaguccaccaacaacagcgacuucuggacggccgugaucgccguggagccccacgucaaccagaccaaccgccaguacgugcuguucggcgagaacaagcaguucaacaucgagaacuccagcgacaaguggaaguucuucgagauguucaagggcaacucccagagcgacuucuccaaccggcgcacccugaccagcuccaaccggcugguggggaugcucaaguacggcgggcgcgucuggacguuccacggcgagaccccgcgggccaccaccgacagcuccagcacggccgaccugaacaacaucuccaucaucauccacagcgaguucuacaucaucccccgcagccaggaguccaagugcaacgaguacaucaacaacgggcuguga

SEQ ID NO: 245 - RNA, 594 nt, Artificial Sequence
  derived and/or modified CDS sequence (opt1) from RVA/DS-1/P[4]__CAD62680.1__SP-IgE_P2_VP8*(65-223)
auggacuggaccuggauccuguuccucguggccgccgcgacccgcguccacagccaguacaucaaggccaacagcaaguucaucggcaucaccgagcugggcagcggguccggccucgacgggcccuaccagccgacgaccuucaagccgcccaacgacuacuggcugcugaucuccagcaacaccaacggcguggucuacgaguccaccaacaacaacgacuucuggacggccgugagcuccguggagccccacgucagccagaccaaccgccaguacauccucuucggggagaacaagcaguucaacguggagaacaacuccgacaaguggaaguucuucgagaccuucaccggcagcucccagggcaacuucagcaaccggcgcacgcugaccuccagcaaccggcugguggggaugcucaaguacggcgggcgcgucuggaccuuccacggcgagacgccccgggccaccaccgacuccagcaacaccgccgaccugaacaacaucagcaucaucauccacuccgaguucuacaucaucccccgcagccaggaguccaagugcaacgaguacaucaacaacgggcuguga

SEQ ID NO: 246 - RNA, 594 nt, Artificial Sequence; identical to SEQ ID NO: 245
  derived and/or modified CDS sequence (opt1) from RVA/DS-1/P[4]__ABV53252.1__SP-IgE_P2_VP8*(65-223)

SEQ ID NO: 247 - RNA, 594 nt, Artificial Sequence
  derived and/or modified CDS sequence (opt1) from RVA/F01322/P[6]__AFA51886.1__SP-IgE_P2_VP8*(65-223)
auggacuggaccuggauccuguuccucguggccgccgcgacccgcguccacagccaguacaucaaggccaacagcaaguucaucggcaucaccgagcugggcagcggguccggccucgacgggcccuaccagccgaccaacuucaagccgcccaacgacuacuggauccugcugaaccccaccaaccagcagguggugcucgagggcacgaacaagaccgacaucugggucgcccugcugcucguggagccgaacgugaccaaccagagccggcaguacacccuguucggggagacgaagcagaucaccgucgagaacaacaccaacaaguggaaguucuucgagauguuccgcuccagcguguccgccgaguuccagcacaagcggacccugacgagcgacaccaagcucgccggcuucaugaaguucuacaacuccguguggaccuuccacggcgagacccccaacgccacgaccgacuacagcuccaccagcaaccuguucgaggucgagaccgugauccacguggaguucuacaucaucccccgcucccaggagagcaagugcuccgaguacaucaacacggggcuguga

SEQ ID NO: 248 - RNA, 594 nt, Artificial Sequence
  derived and/or modified CDS sequence (opt1) from RVA/1076/P[6]__AAA47337.1__SP-IgE_P2_VP8*(65-223)
auggacuggaccuggauccuguuccucguggccgccgcgacccgcguccacagccaguacaucaaggccaacagcaaguucaucggcaucaccgagcugggcagcggguccggccucgacgggcccuaccagccgaccuccuucaagccgcccagcgacuacuggauccugcugaaccccaccaaccagcaggucgugcucgagggcacgaacaagaccgacaucuggguggcccugcugcucguggagcccaacgugaccaaccagucccggcaguacacccuguucggggagacgaagcagaucaccgucgagaacaacaccaacaaguggaaguucuucgagauguuccgcagcuccgugagcgccgaguuccagcacaagcggacccugacguccgacaccaagcucgccggcuuccugaaguucuacaacagcguguggaccuucuacggcgagacgccccacgccaccaccgacuacuccagcaccuccaaccugagcgaggucgagaccgcgauccacguggaguucuacaucaucccccgcucccaggagagcaagugcaacgaguacaucaacacggggcuguga

SEQ ID NO: 249 - RNA, 594 nt, Artificial Sequence
  derived and/or modified CDS sequence (opt1) from RVA/BE1128/P[8]__AEX30671.1__SP-IgE_P2_VP8*(65-223)
auggacuggaccuggauccuguuccucguggccgccgcgacccgcguccacagccaguacaucaaggccaacagcaaguucaucggcaucaccgagcugggcagcggguccggccucgacggcccguaccagccgacgaccuucaccccgcccaccgacuacuggauccugaucacguccaacaccaacggggugguguacgagagcaccaacaacuccgacuucuggaccgccgucaucgccguggagccccacgugaacccggucgaccgccaguacaacguguucggcgagaacaagcaguucaacgugcggaacgacagcgacaaguggaaguuccuggagauguuccgcggcuccagccagaacgacuucuacaaccggcgcacgcucaccuccgacacccggcuggucgggauccugaaguacggcgggcgcguguggaccuuccacggcgagacgccccgggccaccaccgacagcuccaacaccgccaaccucgacgggaucagcaucacgauccacuccgaguucuacaucaucccccgcagccaggaguccaagugcaacgaguacaucaacaacggccuguga

SEQ ID NO: 250 - RNA, 594 nt, Artificial Sequence
  derived and/or modified CDS sequence (opt1) from RVA/Wa-VirWa/P[8]__ACR22783.1__SP-IgE_P2_VP8*(65-223)
auggacuggaccuggauccuguuccucguggccgccgcgacccgcguccacagccaguacaucaaggccaacagcaaguucaucggcaucaccgagcugggcagcggguccggccucgacgggcccuaccagccgacgaccuucaccccgcccaacgacuacuggauccugaucaacagcaacaccaacggcgucguguacgaguccacgaacaacagcgacuucuggaccgccguggucgccaucgagccccacgugaacccgguggaccgccaguacaccaucuucggggaguccaagcaguucaacguccggaacgacagcaacaaguggaaguuccuggagauguuccgcuccagcucccagaacgaguucuacaaccggcgcacccucacgagcgacacccggcuggugggcauccugaaguacggcgggcgcguguggaccuuccacggcgagaccccgcgggccacgaccgacuccagcuccaccgccaaccucaacaacaucagcaucaccauccacuccgaguucuacaucaucccccgcagccaggagagcaagugcaacgaguacaucaacaacgggcuguga

SEQ ID NO: 251 - RNA, 594 nt, Artificial Sequence
  derived and/or modified CDS sequence (opt1) from RVA/Wa/P[8]__AAA47290.1__SP-IgE_P2_VP8*(65-223)
auggacuggaccuggauccuguuccucguggccgccgcgacccgcguccacagccaguacaucaaggccaacagcaaguucaucggcaucaccgagcugggcagcggguccggccucgacgggcccuaccagccgacgaccuucaccccgcccaacgacuacuggauccugaucaacagcaacaccaacggcgucguguacgaguccacgaacaacagcgacuucuggaccgccguggucgccaucgagccccacgugaaccccguggaccgccaguacaccaucuucggggaguccaagcaguucaacgucagcaacgacuccaacaaguggaaguuccuggagauguuccggagcuccagccagaacgaguucuacaaccgccggacccucacguccgacacccgcuucgugggcauccugaaguacggcgggcggguguggaccuuccacggcgagacgccccgcgccaccaccgacagcuccagcaccgccaaccugaacaacaucuccaucaccauccacagcgaguucuacaucaucccccggagccaggaguccaagugcaacgaguacaucaacaacgggcuguga

SEQ ID NO: 252 - RNA, 594 nt, Artificial Sequence; identical to SEQ ID NO: 251
  derived and/or modified CDS sequence (opt1) from RVA/Wa/P[8]__AAA66953.1__SP-IgE_P2_VP8*(65-223)

SEQ ID NO: 253 - RNA, 666 nt, Artificial Sequence
  derived and/or modified CDS sequence (opt1) from RVA/BE1058/P[4]__AEX30665.1__SP-IgE_P2_VP8*(41-223)
auggacuggaccuggauccuguuccucguggccgccgcgacccgcguccacagccaguacaucaaggccaacagcaaguucaucggcaucaccgagcugggcagcggguccggcgcccagacccgguacgcgcccgugaacuggggccacggggagaucaacgacagcaccaccgucgagcccgugcucgacggccccuaccagcccacgaccuucaagccgcccaacgacuacuggcugcugaucuccagcaacaccgacgggguggucuacgaguccaccaacaacagcgacuucuggacggccgugaucgccguggagccccacgucaaccagaccaaccgccaguacgugcuguucggcgagaacaagcaguucaacaucgagaacuccagcgacaaguggaaguucuucgagauguucaagggcaacucccagagcgacuucuccaaccggcgcacccugaccagcuccaaccggcugguggggaugcucaaguacggcgggcgcgucuggacguuccacggcgagaccccgcgggccaccaccgacagcuccagcacggccgaccugaacaacaucuccaucaucauccacagcgaguucuacaucaucccccgcagccaggaguccaagugcaacgaguacaucaacaacgggcuguga

SEQ ID NO: 254 - RNA, 666 nt, Artificial Sequence
  derived and/or modified CDS sequence (opt1) from RVA/DS-1/P[4]__CAD62680.1__SP-IgE_P2_VP8*(41-223)
auggacuggaccuggauccuguuccucguggccgccgcgacccgcguccacagccaguacaucaaggccaacagcaaguucaucggcaucaccgagcugggcagcggguccggcgcccagacccgguacgcgcccgugaacuggggcuccugggagaucaacgacagcaccaccgucgagcccgugcucgacgggcccuaccagccgacgaccuucaagccgcccaacgacuacuggcugcugaucuccagcaacaccaacggcguggucuacgaguccaccaacaacaacgacuucuggacggccgugagcuccguggagccccacgucagccagaccaaccgccaguacauccucuucggggagaacaagcaguucaacguggagaacaacuccgacaaguggaaguucuucgagaccuucaccggcagcucccagggcaacuucagcaaccggcgcacgcugaccuccagcaaccggcugguggggaugcucaaguacggcgggcgcgucuggaccuuccacggcgagacgccccgggccaccaccgacuccagcaacaccgccgaccugaacaacaucagcaucaucauccacuccgaguucuacaucaucccccgcagccaggaguccaagugcaacgaguacaucaacaacgggcuguga

SEQ ID NO: 255 - RNA, 666 nt, Artificial Sequence; identical to SEQ ID NO: 254
  derived and/or modified CDS sequence (opt1) from RVA/DS-1/P[4]__ABV53252.1__SP-IgE_P2_VP8*(41-223)

SEQ ID NO: 256 - RNA, 666 nt, Artificial Sequence
  derived and/or modified CDS sequence (opt1) from RVA/F01322/P[6]__AFA51886.1__SP-IgE_P2_VP8*(41-223)
auggacuggaccuggauccuguuccucguggccgccgcgacccgcguccacagccaguacaucaaggccaacagcaaguucaucggcaucaccgagcugggcagcggguccggcgcccagaccaacuacgcgcccgugaccuggagccacggcgaggugaacgacuccacgaccaucgagcccguccucgacgggcccuaccagccgaccaacuucaagccgcccaacgacuacuggauccugcugaaccccaccaaccagcagguggugcucgagggcacgaacaagaccgacaucugggucgcccugcugcucguggagccgaacgugaccaaccagagccggcaguacacccuguucggggagacgaagcagaucaccgucgagaacaacaccaacaaguggaaguucuucgagauguuccgcuccagcguguccgccgaguuccagcacaagcggacccugacgagcgacaccaagcucgccggcuucaugaaguucuacaacuccguguggaccuuccacggcgagacccccaacgccacgaccgacuacagcuccaccagcaaccuguucgaggucgagaccgugauccacguggaguucuacaucaucccccgcucccaggagagcaagugcuccgaguacaucaacacggggcuguga

SEQ ID NO: 257 - RNA, 666 nt, Artificial Sequence
  derived and/or modified CDS sequence (opt1) from RVA/1076/P[6]__AAA47337.1__SP-IgE_P2_VP8*(41-223)
auggacuggaccuggauccuguuccucguggccgccgcgacccgcguccacagccaguacaucaaggccaacagcaaguucaucggcaucaccgagcugggcagcggguccggcgcccagaccaacuacgcgcccgugaccuggagccacggcgaggugaacgacagcacgaccaucgagcccguccucgacgggcccuaccagccgaccuccuucaagccgcccagcgacuacuggauccugcugaaccccaccaaccagcaggucgugcucgagggcacgaacaagaccgacaucuggguggcccugcugcucguggagcccaacgugaccaaccagucccggcaguacacccuguucggggagacgaagcagaucaccgucgagaacaacaccaacaaguggaaguucuucgagauguuccgcagcuccgugagcgccgaguuccagcacaagcggacccugacguccgacaccaagcucgccggcuuccugaaguucuacaacagcguguggaccuucuacggcgagacgccccacgccaccaccgacuacuccagcaccuccaaccugagcgaggucgagaccgcgauccacguggaguucuacaucaucccccgcucccaggagagcaagugcaacgaguacaucaacacggggcuguga

SEQ ID NO: 258 - RNA, 666 nt, Artificial Sequence
  derived and/or modified CDS sequence (opt1) from RVA/BE1128/P[8]__AEX30671.1__SP-IgE_P2_VP8*(41-223)
auggacuggaccuggauccuguuccucguggccgccgcgacccgcguccacagccaguacaucaaggccaacagcaaguucaucggcaucaccgagcugggcagcggguccggcgcccagacccgguacgcgcccgugaacuggggccacggggagaucaacgacagcaccaccgucgagcccauccucgacggcccguaccagccgacgaccuucaccccgcccaccgacuacuggauccugaucacguccaacaccaacggggugguguacgagagcaccaacaacuccgacuucuggaccgccgucaucgccguggagccccacgugaacccggucgaccgccaguacaacguguucggcgagaacaagcaguucaacgugcggaacgacagcgacaaguggaaguuccuggagauguuccgcggcuccagccagaacgacuucuacaaccggcgcacgcucaccuccgacacccggcuggucgggauccugaaguacggcgggcgcguguggaccuuccacggcgagacgccccgggccaccaccgacagcuccaacaccgccaaccucgacgggaucagcaucacgauccacuccgaguucuacaucaucccccgcagccaggaguccaagugcaacgaguacaucaacaacggccuguga

SEQ ID NO: 259 - RNA, 666 nt, Artificial Sequence
  derived and/or modified CDS sequence (opt1) from RVA/Wa-VirWa/P[8]__ACR22783.1__SP-IgE_P2_VP8*(41-223)
auggacuggaccuggauccuguuccucguggccgccgcgacccgcguccacagccaguacaucaaggccaacagcaaguucaucggcaucaccgagcugggcagcggguccggcgcccagacccgguacgcgcccgugaacugggggcacggcgagaucaacgacuccaccaccguggagcccauccucgacgggcccuaccagccgacgaccuucaccccgcccaacgacuacuggauccugaucaacagcaacaccaacggcgucguguacgaguccacgaacaacagcgacuucuggaccgccguggucgccaucgagccccacgugaacccgguggaccgccaguacaccaucuucggggaguccaagcaguucaacguccggaacgacagcaacaaguggaaguuccuggagauguuccgcuccagcucccagaacgaguucuacaaccggcgcacccucacgagcgacacccggcuggugggcauccugaaguacggcgggcgcguguggaccuuccacggcgagaccccgcgggccacgaccgacuccagcuccaccgccaaccucaacaacaucagcaucaccauccacuccgaguucuacaucaucccccgcagccaggagagcaagugcaacgaguacaucaacaacgggcuguga

SEQ ID NO: 260 - RNA, 666 nt, Artificial Sequence
  derived and/or modified CDS sequence (opt1) from RVA/Wa/P[8]__AAA47290.1__SP-IgE_P2_VP8*(41-223)
auggacuggaccuggauccuguuccucguggccgccgcgacccgcguccacagccaguacaucaaggccaacagcaaguucaucggcaucaccgagcugggcagcggguccggcgcccagacccgguacgcgcccgugaacugggggcacggcgagaucaacgacuccaccaccguggagcccauccucgacgggcccuaccagccgacgaccuucaccccgcccaacgacuacuggauccugaucaacagcaacaccaacggcgucguguacgaguccacgaacaacagcgacuucuggaccgccguggucgccaucgagccccacgugaaccccguggaccgccaguacaccaucuucggggaguccaagcaguucaacgucagcaacgacuccaacaaguggaaguuccuggagauguuccggagcuccagccagaacgaguucuacaaccgccggacccucacguccgacacccgcuucgugggcauccugaaguacggcgggcggguguggaccuuccacggcgagacgccccgcgccaccaccgacagcuccagcaccgccaaccugaacaacaucuccaucaccauccacagcgaguucuacaucaucccccggagccaggaguccaagugcaacgaguacaucaacaacgggcuguga

SEQ ID NO: 261 - RNA, 666 nt, Artificial Sequence
  derived and/or modified CDS sequence (opt1) from RVA/Wa/P[8]__AAA66953.1__SP-IgE_P2_VP8*(41-223)
auggacuggaccuggauccuguuccucguggccgccgcgacccgcguccacagccaguacaucaaggccaacagcaaguucaucggcaucaccgagcugggcagcggguccggcgcccagacccgguacgcgcccgugaacugggggcacggcgagaucaacgacuccaccaccguggagcccaugcucgacgggcccuaccagccgacgaccuucaccccgcccaacgacuacuggauccugaucaacagcaacaccaacggcgucguguacgaguccacgaacaacagcgacuucuggaccgccguggucgccaucgagccccacgugaaccccguggaccgccaguacaccaucuucggggaguccaagcaguucaacgucagcaacgacuccaacaaguggaaguuccuggagauguuccggagcuccagccagaacgaguucuacaaccgccggacccucacguccgacacccgcuucgugggcauccugaaguacggcgggcggguguggaccuuccacggcgagacgccccgcgccaccaccgacagcuccagcaccgccaaccugaacaacaucuccaucaccauccacagcgaguucuacaucaucccccggagccaggaguccaagugcaacgaguacaucaacaacgggcuguga

SEQ ID NO: 262 - RNA, 2328 nt, Artificial Sequence
  derived and/or modified CDS sequence (opt1) from RVA/BE1058/P[4]__AEX30665.1__VP4
auggccagccugaucuaccgccagcuccugaccaacuccuacagcguggaccugcacgacgagaucgagcagaucggcuccgagaagacccagaacgucacggugaaccccgggccguucgcccagacccgguacgcgcccgugaacuggggccacggggagaucaacgacagcaccaccgucgagcccgugcucgacggccccuaccagccgacgaccuucaagccgcccaacgacuacuggcugcugaucuccagcaacaccgacgggguggucuacgaguccaccaacaacagcgacuucuggacggccgugaucgccguggagccccacgucaaccagaccaaccgccaguacguccucuucggcgagaacaagcaguucaacaucgagaacuccagcgacaaguggaaguucuucgagauguucaagggcaacucccagagcgacuucuccaaccggcgcacccugaccagcuccaaccggcugguggggaugcucaaguacggcgggcgcguguggacguuccacggcgagacgccccgggccaccaccgacagcuccagcaccgccgaccugaacaacaucuccaucaucauccacagcgaguucuacaucaucccccgcagccaggaguccaagugcaacgaguacaucaacaacgggcugccgcccauccagaacacccggaacguggugccccucagccuguccagccgcuccauccaguaccggcgcgcgcaggucaacgaggacaucaccaucagcaagaccucccuguggaaggagaugcaguacaaccgggacaucaucauccgcuucaaguucggcaacagcgugaucaagcucggcgggcugggcuacaagugguccgagaucagcuacaaggccgccaacuaccaguacuccuacagccgggacggggagcaggucacggcccacacgaccugcuccgugaacggcgugaacaacuucagcuacaacggcgggucccugcccaccgacuucagcaucucccgcuacgaggugaucaaggagaacagcuacgucuacaucgacuacugggacgacuccaaggcguuccggaacaugguguacgugcgcagccucgccgccaaccugaacagcgucaagugcgccggcggguccuacgacuuccggcugcccgugggcgaguggcccaucaugaacgggggcgccgucagccuccacuucgcgggcgugacccuguccacccaguucaccgacuucgugagccugaacucccuccgcuuccgguucagccugaccgucgacgagccguccuucagcaucauccgcacgcgcaccaugaaccuguacgggcuccccgccgccaaccccaacaacggcaacgaguacuacgagguguccgggcgguucagccugaucucccuggugcccaccaacgacgacuaccagaccccgaucaugaacagcgucacggugcgccaggaccucgagcggcagcugaacgaccugcgcgaggaguucaacucccucagccaggagaucgccaugucccagcugaucgaccuggcccuccugccccuggacauguucagcauguucuccggcaucaagagcaccaucgaccucaccaagagcauggcgaccuccgugaugaagaaguuccgcaagagcaagcuggccacguccaucagcgagaugaccaacucccugagcgacgccgccuccagcgccucccggagcgcguccauccggagcaaccucuccgccaucagcaacugguccgacgccagcaaguccguccugaacgugaccgacagccugaacgacguguccacccagaccagcacgaucagcaagaagcuccgccugaaggagaugaucacccagaccgaggggaucaacuucgacgacaucuccgccgccguccugaagaccaagauggacaugagcacgcagaucggcaagaacacccugcccgacaucgugaccgaggcguccgagaaguucauccccaagcggagcuaccgcgugcucaaggacgacgaggucauggaggugaacaccgagggcaaguucuucgccuacaagguggacacgcugaacgagaucccguucgacaucaacaaguucgccgagcuggucaccgacucccccgugaucagcgccaucaucgacuucaagacccucaagaaccugaacgacaacuacgggaucacccggaucgaggcgcuggaccucaucaaguccaaccccaacgugcugcgcaacuucaucaaccagaacaaccccaucauccggaaccgcaucgagcagcugauccuccagugcaagcuguga

SEQ ID NO: 263 - RNA, 2328 nt, Artificial Sequence; identical to SEQ ID NO: 155
  derived and/or modified CDS sequence (opt1) from RVA/DS-1/P[4]__CAD62680.1__VP4

SEQ ID NO: 264 - RNA, 2328 nt, Artificial Sequence; identical to SEQ ID NO: 155
  derived and/or modified CDS sequence (opt1) from RVA/DS-1/P[4]__ABV53252.1__VP4

SEQ ID NO: 265 - RNA, 2328 nt, Artificial Sequence
  derived and/or modified CDS sequence (opt1) from RVA/F01322/P[6]__AFA51886.1__VP4
auggccagccugaucuaccgccagcuccugaccaacuccuacaccguggagcugagcgacgagaucaacacgaucggcuccgagaagaaccagaacgucaccaucaaccccgggccguucgcccagaccaacuacgcgcccgugaccuggagccacggcgaggugaacgacuccacgaccaucgagcccguccucgacgggcccuaccagccgaccaacuucaagccgcccaacgacuacuggauccugcugaaccccaccaaccagcaggucgugcucgagggcacgaacaagaccgacaucuggguggcccugcugcucguggagcccaacgugaccaaccagagccggcaguacacccuguucggggagacgaagcagaucaccgucgagaacaacaccaacaaguggaaguucuucgagauguuccgcuccagcguguccgccgaguuccagcacaagcggacccugacgagcgacaccaagcucgccggcuucaugaaguucuacaacuccguguggaccuuccacggcgagacccccaacgccacgaccgacuacagcuccaccagcaaccuguucgaggucgagaccgugauccacguggaguucuacaucaucccccgcucccaggagagcaagugcuccgaguacaucaacacggggcugcccccgaugcagaacacccggaacaucguccccguggcgcucagcucccgcagcgugaccuaccagcgggcccaggucaacgaggacaucaucaucagcaagaccucccuguggaaggagaugcaguacaaccgcgacaucaucauccgguucaaguucaacaacagcaucgugaagcugggcgggcucggcuacaagugguccgagaucagcuucaaggccgccaacuaccaguacaacuaccugcgcgacggggagcaggucacggcgcacacgaccugcuccgugaacggcgugaacaacuucagcuacaacggcgggucccugcccaccgacuucagcgugucccgguacgaggucaucaaggagaacagcuacguguacgucgacuacugggacgacucccaggccuuccgcaacaugguguacgugcggagccucgccgccaaccugaacuccgucaagugcagcggcgggaacuacaacuuccagauccccgugggcgccuggccggugauguccggcggggcggucagccugcacuucgccggcgugacccucuccacccaguucaccgacuucgugagccugaacucccugcgcuuccgguucagccucaccgucgaggagccgcccuucagcauccugcgcacgcggguguccgggcuguacggccuccccgccuucgaccccaacaacgggcacgaguacuacgagaucaacggccgcuucagccugaucucccuggugcccagcaacgacgacuaccagacccccaucaugaacuccgucaccgugcggcaggaccucgagcgccagcugggcgaccugcgggaggaguucaacagccucucccaggagaucgccaugacccagcugaucgaccuggcccuccugccccuggacauguucagcauguucuccgggaucaagagcaccaucgacgcggccaaguccauggccacgaaggugaugaagaaguucaagaaguccggccucgccaccagcaucagcgagcugaccgggucccugagcaacgccgcguccagcgucagccgcaacuccagcauccgcuccaacaucagcuccaucagcguguggaccgacguguccgagcagaucgccggcacgagcgacuccguccggaacaucagcacccagaccuccgccaucagcaagaagcuccgccugcgggagaucaccacgcagaccgaggggaugaacuucgacgacaucuccgccgccgugcugaagaccaagaucgacaagagcacccacaucuccccggacacgcugcccgacaucaucaccgagagcuccgagaaguucauccccaagcgcgcguaccgggugcucaaggacgacgaggucauggaggccgacguggacggcaaguucuucgccuacaagguggacaccuucgaggagguccccuucgacguggacaaguucguggaccuggucaccgacagcccggugaucuccgccaucaucgacuucaagacgcugaagaaccucaacgacaacuacggcaucacccgcagccaggcgcuggaccugauccggagcgacccccgcgugcuccgggacuucaucaaccagaacaaccccaucaucaagaaccgcaucgagcagcugauccugcagugccggcucuga

SEQ ID NO: 266 - RNA, 2328 nt, Artificial Sequence; identical to SEQ ID NO: 158
  derived and/or modified CDS sequence (opt1) from RVA/1076/P[6]__AAA47337.1__VP4

SEQ ID NO: 267 - RNA, 2328 nt, Artificial Sequence
  derived and/or modified CDS sequence (opt1) from RVA/BE1128/P[8]__AEX30671.1__VP4
auggccagccugaucuaccgccagcuccugaccaacuccuacagcguggaccugcacgacgagaucgagcagaucggcuccgagaagacccagaacgucacggugaaccccgggccguucgcccagacccgguacgcgcccgugaacuggggccacggggagaucaacgacagcaccaccgucgagcccauccucgacggccccuaccagccgacgaccuucaccccgcccaccgacuacuggauccugaucacguccaacaccaacggggugguguacgagagcaccaacaacuccgacuucuggaccgccgucaucgccguggagccccacgugaaccccgucgaccgccaguacaacguguucggcgagaacaagcaguucaacgugcggaacgacagcgacaaguggaaguuccuggagauguuccgcggcuccagccagaacgacuucuacaaccggcgcacgcucaccuccgacacccggcuggucgggauccugaaguacggcgggcgcguguggaccuuccacggcgagacgccccgggccaccaccgacagcuccaacaccgccaaccucgacgggaucagcaucacgauccacuccgaguucuacaucaucccccgcagccaggaguccaagugcaacgaguacaucaacaacggccugcccccgauccagaacacccggaacguggucccccugagccucuccagccgcagcauccaguacaagcgggcccaggugaacgaggacaucaccaucuccaagaccagccuguggaaggagaugcaguacaaccgcgacaucaucauccgguucaaguucggcaacuccaucgugaagcucgggggccugggguacaaguggagcgagaucuccuacaaggcggccaacuaccaguacaacuaccugcgcgacggcgagcaggucacggcccacacgaccugcagcgugaacggcgugaacaacuucuccuacaacgggggcagccugcccaccgacuucuccgucagccgguacgaggugaucaaggagaacuccuacguguacgucgacuacugggacgacagcaaggcguuccgcaacaugguguacguccggucccucgccgccaaccugaacagcgugaagugcaccgggggcuccuacgacuucagcauccccgugggggccuggccggucaugaacggcggcgccgugucccugcacuucgcgggggugacccucagcacccaguucaccgacuucgucucccugaacagccugcgcuuccgguucagccucacgguggacgagcccuccuucagcauccugcgcacccgcaccgugaaccuguacggccuccccgccgccaaccccaacaacgggaacgaguacuacgagaucuccggccgguucagccugaucucccuggucccgaccaacgacgacuaccagacgcccaucaugaacagcgugaccgugcgccaggaccucgagcggcagcugaccgaccugcgcgaggaguucaacucccucagccaggagaucgccaugucccagcugaucgaccuggcccuccugccccuggacauguucagcauguucuccgggaucaagagcaccaucgaccucaccaaguccauggcgacgagcgucaugaagaaguuccggaaguccaagcuggccaccagcguguccgagaugaccaacagccugagcgacgccgccuccagcgccucccgcagcguguccguccggagcaacaucuccgcggugagcaacuggaccaacguguccaacgacgucagcaacgugacgaacuccgugaacgacaucagcacccagaccuccaccaucagcaagaaccuccgccugaaggagaugaucacgcagaccgagggcauguccuucgacgacaucagcgccgccguccugaagaccaagaucgacauguccacccagaucggcaagaacacgcuccccgacaucgugaccgaggccagcgagaaguucaucccgaagcgguccuaccgcauccugaaggacgacgaggugauggagaucaacaccgaggggaaguucuucgccuacaagaucgacacccugaacgagguccccuucgacgugaacaaguucacggagcuggugaccaacagccccgucaucagcgcgaucaucgacuucaagacccucaagaaccugaacgacaacuacggcaucacccggacggaggcccugaaccucaucaaguccaaccccaacgugcugcgcaacuucaucaaccagaacaacccgaucauccggaaccgcaucgagcagcugauccuccagugcaagcuguga

SEQ ID NO: 268 - RNA, 2328 nt, Artificial Sequence
  derived and/or modified CDS sequence (opt1) from RVA/Wa-VirWa/P[8]__ACR22783.1__VP4
auggccagccugaucuaccgccagcuccugaccaacuccuacagcguggaccugcacgacgagaucgagcagaucggcuccgagaagacccagaacgucacgaucaaccccagcccguucgcccagacccgguacgcgcccgugaacugggggcacggcgagaucaacgacuccaccaccguggagcccauccucgacgggcccuaccagccgacgaccuucaccccgcccaacgacuacuggauccugaucaacagcaacaccaacggcgucguguacgaguccacgaacaacagcgacuucuggaccgccguggucgccaucgagccccacgugaaccccguggaccgccaguacaccaucuucggggaguccaagcaguucaacguccggaacgacagcaacaaguggaaguuccuggagauguuccgcuccagcucccagaacgaguucuacaaccggcgcacccucacgagcgacacccggcuggugggcauccugaaguacggcgggcgcguguggaccuuccacggcgagacgccccgggccaccaccgacuccagcuccaccgccaaccucaacaacaucagcaucaccauccacuccgaguucuacaucaucccccgcagccaggagagcaagugcaacgaguacaucaacaacgggcugcccccgauccagaacacgcggaacgucgugccccugccccucuccagccgcuccauccaguacaagcgggcccaggugaacgaggacaucaucgucagcaagaccucccuguggaaggagaugcaguacaaccgcgacaucaucauccgguucaaguucggcaacagcaucgugaagaugggcgggcugggcuacaagugguccgagaucagcuacaaggcggccaacuaccaguacaacuaccuccgcgacggggagcaggucaccgcccacaccacgugcuccgugaacggcgugaacaacuucagcuacaacgggggcucccugcccaccgacuucggcaucagccgguacgaggugaucaaggagaacuccuacgucuacguggacuacugggacgacagcaaggcguuccgcaacaugguguacguccggucccuggccgccaaccucaacagcgugaagugcaccgggggcuccuacgacuucagcaucccggucggggccuggcccgugaugaacggcggggccgugucccugcacuucgcgggcgucacccugagcacgcaguucaccgacuucgugagccucaacucccugcgcuuccgguucagccugaccguggacgagccgcccuucuccauccuccgcacccgcacggucaaccuguacggccugcccgccgccaaccccaacaacgggaacgaguacuacgagaucagcggccgguucucccucaucagccuggugcccaccaacgacgacuaccagacccccaucaugaacuccgugaccguccgccaggaccuggagcggcagcucacggaccugcgcgaggaguucaacagccugucccaggagaucgccauggcccagcucaucgaccuggcgcugcucccgcuggacauguucagcauguucuccgggaucaagagcaccaucgaccugaccaaguccauggccaccagcgugaugaagaaguuccggaaguccaagcucgccaccagcaucuccgagaugacgaacagccugagcgacgccgccuccagcgcgucccgcaacgugagcauccgguccaaccugagcgccaucuccaacuggaccaacgucagcaacgacguguccaacgugaccaacagccucaacgacaucuccacccagacgagcaccaucuccaagaagcugcgccugaaggagaugaucacccagaccgagggcaugagcuucgacgacaucuccgccgccguccucaagacgaagaucgacaugagcacccagaucgggaagaacacccugcccgacaucgugaccgaggccuccgagaaguucauccccaagcggagcuaccgcauccugaaggacgacgaggugauggagaucaacacggagggcaaguucuucgcguacaagaucaacaccuucgacgagguccccuucgacgugaacaaguucgccgagcuggugaccgacuccccggucaucagcgccaucaucgacuucaagacccucaagaaccugaacgacaacuacggcaucacgcggaccgaggcccugaaccucaucaagagcaaccccaacaugcugcgcaacuucaucaaccagaacaaccccaucauccggaaccgcaucgagcagcugauccuccagugcaagcuguga

SEQ ID NO: 269 - RNA, 2328 nt, Artificial Sequence; identical to SEQ ID NO: 161
  derived and/or modified CDS sequence (opt1) from RVA/Wa/P[8]__AAA47290.1__VP4

SEQ ID NO: 270 - RNA, 2328 nt, Artificial Sequence; identical to SEQ ID NO: 162
  derived and/or modified CDS sequence (opt1) from RVA/Wa/P[8]__AAA66953.1__VP4

SEQ ID NO: 271 - RNA, 720 nt, Artificial Sequence
  derived and/or modified CDS sequence (opt1) from RVA/BE1058/P[4]__AEX30665.1__VP8*
auggccagccugaucuaccgccagcuccugaccaacuccuacagcguggaccugcacgacgagaucgagcagaucggcuccgagaagacccagaacgucacggugaaccccgggccguucgcccagacccgguacgcgcccgugaacuggggccacggggagaucaacgacagcaccaccgucgagcccgugcucgacggccccuaccagccgacgaccuucaagccgcccaacgacuacuggcugcugaucuccagcaacaccgacgggguggucuacgaguccaccaacaacagcgacuucuggacggccgugaucgccguggagccccacgucaaccagaccaaccgccaguacguccucuucggcgagaacaagcaguucaacaucgagaacuccagcgacaaguggaaguucuucgagauguucaagggcaacucccagagcgacuucuccaaccggcgcacccugaccagcuccaaccggcugguggggaugcucaaguacggcgggcgcguguggacguuccacggcgagacgccccgggccaccaccgacagcuccagcaccgccgaccugaacaacaucuccaucaucauccacagcgaguucuacaucaucccccgcagccaggaguccaagugcaacgaguacaucaacaacgggcugccgcccauccagaacacccggaacguggugccccucagccuguccagccgc

SEQ ID NO: 272 - RNA, 720 nt, Artificial Sequence; identical to SEQ ID NO: 164
  derived and/or modified CDS sequence (opt1) from RVA/DS-1/P[4]__CAD62680.1__VP8*

SEQ ID NO: 273 - RNA, 720 nt, Artificial Sequence; identical to SEQ ID NO: 164
  derived and/or modified CDS sequence (opt1) from RVA/DS-1/P[4]__ABV53252.1__VP8*

SEQ ID NO: 274 - RNA, 720 nt, Artificial Sequence
  derived and/or modified CDS sequence (opt1) from RVA/F01322/P[6]__AFA51886.1__VP8*
auggccagccugaucuaccgccagcuccugaccaacuccuacaccguggagcugagcgacgagaucaacacgaucggcuccgagaagaaccagaacgucaccaucaaccccgggccguucgcccagaccaacuacgcgcccgugaccuggagccacggcgaggugaacgacuccacgaccaucgagcccguccucgacgggcccuaccagccgaccaacuucaagccgcccaacgacuacuggauccugcugaaccccaccaaccagcaggucgugcucgagggcacgaacaagaccgacaucuggguggcccugcugcucguggagcccaacgugaccaaccagagccggcaguacacccuguucggggagacgaagcagaucaccgucgagaacaacaccaacaaguggaaguucuucgagauguuccgcuccagcguguccgccgaguuccagcacaagcggacccugacgagcgacaccaagcucgccggcuucaugaaguucuacaacuccguguggaccuuccacggcgagacccccaacgccacgaccgacuacagcuccaccagcaaccuguucgaggucgagaccgugauccacguggaguucuacaucaucccccgcucccaggagagcaagugcuccgaguacaucaacacggggcugcccccgaugcagaacacccggaacaucguccccguggcgcucagcucccgc

SEQ ID NO: 275 - RNA, 720 nt, Artificial Sequence; identical to SEQ ID NO: 167
  derived and/or modified CDS sequence (opt1) from RVA/1076/P[6]__AAA47337.1__VP8*

SEQ ID NO: 276 - RNA, 720 nt, Artificial Sequence
  derived and/or modified CDS sequence (opt1) from RVA/BE1128/P[8]__AEX30671.1__VP8*
auggccagccugaucuaccgccagcuccugaccaacuccuacagcguggaccugcacgacgagaucgagcagaucggcuccgagaagacccagaacgucacggugaaccccgggccguucgcccagacccgguacgcgcccgugaacuggggccacggggagaucaacgacagcaccaccgucgagcccauccucgacggccccuaccagccgacgaccuucaccccgcccaccgacuacuggauccugaucacguccaacaccaacggggugguguacgagagcaccaacaacuccgacuucuggaccgccgucaucgccguggagccccacgugaaccccgucgaccgccaguacaacguguucggcgagaacaagcaguucaacgugcggaacgacagcgacaaguggaaguuccuggagauguuccgcggcuccagccagaacgacuucuacaaccggcgcacgcucaccuccgacacccggcuggucgggauccugaaguacggcgggcgcguguggaccuuccacggcgagacgccccgggccaccaccgacagcuccaacaccgccaaccucgacgggaucagcaucacgauccacuccgaguucuacaucaucccccgcagccaggaguccaagugcaacgaguacaucaacaacggccugcccccgauccagaacacccggaacguggucccccugagccucuccagccgc

SEQ ID NO: 277 - RNA, 720 nt, Artificial Sequence
  derived and/or modified CDS sequence (opt1) from RVA/Wa-VirWa/P[8]__ACR22783.1__VP8*
auggccagccugaucuaccgccagcuccugaccaacuccuacagcguggaccugcacgacgagaucgagcagaucggcuccgagaagacccagaacgucacgaucaaccccagcccguucgcccagacccgguacgcgcccgugaacugggggcacggcgagaucaacgacuccaccaccguggagcccauccucgacgggcccuaccagccgacgaccuucaccccgcccaacgacuacuggauccugaucaacagcaacaccaacggcgucguguacgaguccacgaacaacagcgacuucuggaccgccguggucgccaucgagccccacgugaaccccguggaccgccaguacaccaucuucggggaguccaagcaguucaacguccggaacgacagcaacaaguggaaguuccuggagauguuccgcuccagcucccagaacgaguucuacaaccggcgcacccucacgagcgacacccggcuggugggcauccugaaguacggcgggcgcguguggaccuuccacggcgagacgccccgggccaccaccgacuccagcuccaccgccaaccucaacaacaucagcaucaccauccacuccgaguucuacaucaucccccgcagccaggagagcaagugcaacgaguacaucaacaacgggcugcccccgauccagaacacgcggaacgucgugccccugccccucuccagccgc

SEQ ID NO: 278 - RNA, 720 nt, Artificial Sequence; identical to SEQ ID NO: 170
  derived and/or modified CDS sequence (opt1) from RVA/Wa/P[8]__AAA47290.1__VP8*

SEQ ID NO: 279 - RNA, 720 nt, Artificial Sequence; identical to SEQ ID NO: 171
  derived and/or modified CDS sequence (opt1) from RVA/Wa/P[8]__AAA66953.1__VP8*

SEQ ID NO: 280 - RNA, 477 nt, Artificial Sequence
  derived and/or modified CDS sequence (opt1) from RVA/BE1058/P[4]__AEX30665.1__VP8*(65-223)
cuggacggccccuaccagccgaccaccuucaagccgcccaacgacuacuggcuccugaucagcuccaacacggacgggguggucuacgagagcaccaacaacuccgacuucuggaccgccgugaucgccguggagccccacgucaaccagaccaaccgccaguacgugcuguucggcgagaacaagcaguucaacaucgagaacagcuccgacaaguggaaguucuucgagauguucaaggggaacagccaguccgacuucagcaaccggcgcacgcucaccuccagcaaccggcuggugggcaugcugaaguacgggggccgcgucuggaccuuccacggcgagacgccccgggcgaccaccgacuccagcuccaccgccgaccucaacaacaucagcaucaucauccacuccgaguucuacaucaucccccgcagccaggaguccaagugcaacgaguacaucaacaacgggcug

SEQ ID NO: 281 - RNA, 477 nt, Artificial Sequence
  derived and/or modified CDS sequence (opt1) from RVA/DS-1/P[4]__CAD62680.1__VP8*(65-223)
cuggacggccccuaccagccgaccaccuucaagccgcccaacgacuacuggcuccugaucagcuccaacacgaacgggguggucuacgagagcaccaacaacaacgacuucuggaccgccguguccagcguggagccccacgucucccagaccaaccgccaguacauccuguucggcgagaacaagcaguucaacguggagaacaacagcgacaaguggaaguucuucgagacguucaccggguccagccagggcaacuucuccaaccggcgcacccucaccagcuccaaccggcugguggggaugcugaaguacggcggccgcgucuggacguuccacggggagacgccccgggccaccaccgacagcuccaacaccgcggaccucaacaacaucagcaucaucauccacuccgaguucuacaucaucccccgcagccaggaguccaagugcaacgaguacaucaacaacggccug

SEQ ID NO: 282 - RNA, 477 nt, Artificial Sequence; identical to SEQ ID NO: 281
  derived and/or modified CDS sequence (opt1) from RVA/DS-1/P[4]__ABV53252.1__VP8*(65-223)

SEQ ID NO: 283 - RNA, 477 nt, Artificial Sequence
  derived and/or modified CDS sequence (opt1) from RVA/F01322/P[6]__AFA51886.1__VP8*(65-223)
cuggacggccccuaccagccgaccaacuucaagccgcccaacgacuacuggauccuccugaaccccaccaaccagcaggucgugcuggaggggacgaacaagaccgacaucuggguggcccuccugcugguggagcccaacgucaccaaccagagccgccaguacacccucuucggcgagacgaagcagaucaccguggagaacaacaccaacaaguggaaguucuucgagauguuccgguccagcguguccgccgaguuccagcacaagcgcacccugacgagcgacaccaagcuggcgggguucaugaaguucuacaacuccgucuggaccuuccacggcgagacccccaacgccacgaccgacuacagcuccaccagcaaccucuucgagguggagaccgugauccacgucgaguucuacaucaucccccggucccaggagagcaagugcuccgaguacaucaacacggggcug

SEQ ID NO: 284 - RNA, 477 nt, Artificial Sequence
  derived and/or modified CDS sequence (opt1) from RVA/1076/P[6]__AAA47337.1__VP8*(65-223)
cuggacggccccuaccagccgaccagcuucaagccgcccuccgacuacuggauccuccugaaccccaccaaccagcaggucgugcuggaggggacgaacaagaccgacaucuggguggcccuccugcugguggagcccaacgucaccaaccagagccgccaguacacccucuucggcgagacgaagcagaucaccguggagaacaacaccaacaaguggaaguucuucgagauguuccgguccagcguguccgccgaguuccagcacaagcgcacccugacgagcgacaccaagcuggcgggguuccucaaguucuacaacuccgucuggaccuucuacggcgagacgccccacgccaccaccgacuacagcuccaccagcaaccuguccgagguggagaccgccauccacguggaguucuacaucaucccccggagccaggaguccaagugcaacgaguacaucaacacggggcug

SEQ ID NO: 285 - RNA, 477 nt, Artificial Sequence
  derived and/or modified CDS sequence (opt1) from RVA/BE1128/P[8]__AEX30671.1__VP8*(65-223)
cuggacggccccuaccagccgaccaccuucacgccgcccaccgacuacuggauccucaucaccagcaacaccaacgggguggucuacgaguccacgaacaacagcgacuucuggaccgccgugaucgccguggagccccacgucaaccccguggaccgccaguacaacguguucggcgagaacaagcaguucaacguccggaacgacuccgacaaguggaaguuccuggagauguuccgcgggagcucccagaacgacuucuacaaccggcgcacccugaccagcgacacgcggcucgugggcauccugaaguacgggggccgcguguggaccuuccacggcgagacgccccgggcgaccaccgacuccagcaacaccgccaaccuggacgggaucuccaucaccauccacagcgaguucuacaucaucccccgcucccaggagagcaagugcaacgaguacaucaacaacggccuc

SEQ ID NO: 286 - RNA, 477 nt, Artificial Sequence
  derived and/or modified CDS sequence (opt1) from RVA/Wa-VirWa/P[8]__ACR22783.1__VP8*(65-223)
cuggacggccccuaccagccgaccaccuucacgccgcccaacgacuacuggauccucaucaacagcaacaccaacgggguggucuacgaguccaccaacaacagcgacuucuggaccgccgugguggccaucgagccccacgucaaccccguggaccgccaguacacgaucuucggcgaguccaagcaguucaacgugcggaacgacagcaacaaguggaaguuccuggagauguuccgcuccagcucccagaacgaguucuacaaccggcgcacccugaccagcgacacccggcucgucgggauccugaaguacggcgggcgcguguggacguuccacggcgagacgccccgggcgaccaccgacuccagcuccaccgccaaccugaacaacaucagcaucaccauccacuccgaguucuacaucaucccccgcagccaggaguccaagugcaacgaguacaucaacaacggccuc

SEQ ID NO: 287 - RNA, 477 nt, Artificial Sequence
  derived and/or modified CDS sequence (opt1) from RVA/Wa/P[8]__AAA47290.1__VP8*(65-223)
cuggacggccccuaccagccgaccaccuucacgccgcccaacgacuacuggauccucaucaacagcaacaccaacgggguggucuacgaguccaccaacaacagcgacuucuggaccgccgugguggccaucgagccccacgucaaccccguggaccgccaguacacgaucuucggcgaguccaagcaguucaacgugagcaacgacuccaacaaguggaaguuccuggagauguuccggagcuccagccagaacgaguucuacaaccgccggacccugaccuccgacacccgcuucgucgggauccucaaguacggcgggcggguguggacguuccacggcgagacgccccgcgcgaccaccgacagcuccagcaccgccaaccugaacaacaucuccaucaccauccacagcgaguucuacaucaucccccggucccaggagagcaagugcaacgaguacaucaacaacggccug

SEQ ID NO: 288 - RNA, 477 nt, Artificial Sequence; identical to SEQ ID NO: 287
  derived and/or modified CDS sequence (opt1) from RVA/Wa/P[8]__AAA66953.1__VP8*(65-223)

SEQ ID NO: 289 - RNA, 549 nt, Artificial Sequence
  derived and/or modified CDS sequence (opt1) from RVA/BE1058/P[4]__AEX30665.1__VP8*(41-223)
gcccagacccgcuacgcccccgugaacuggggccacggggagaucaacgacagcaccacggucgagccggugcuggacggccccuaccagcccaccaccuucaagcccccgaacgacuacuggcuccugaucuccagcaacaccgacgggguggucuacgaguccacgaacaacagcgacuucuggaccgcggugaucgccguggagccccacgucaaccagaccaaccggcaguacgugcuguucggcgagaacaagcaguucaacaucgagaacuccagcgacaaguggaaguucuucgagauguucaaggggaacucccagagcgacuucuccaaccgccggacccucacgagcuccaaccgccuggugggcaugcugaaguacggcgggcgggucuggaccuuccacggcgagacgccccgcgccaccaccgacagcuccagcaccgccgaccucaacaacaucuccaucaucauccacagcgaguucuacaucaucccccggucccaggagagcaagugcaacgaguacaucaacaacgggcug

SEQ ID NO: 290 - RNA, 549 nt, Artificial Sequence
  derived and/or modified CDS sequence (opt1) from RVA/DS-1/P[4]__CAD62680.1__VP8*(41-223)
gcccagacccgcuacgcccccgugaacuggggcagcugggagaucaacgacuccaccacggucgagccggugcuggacgggcccuaccagcccaccaccuucaagcccccgaacgacuacuggcuccugaucagcuccaacaccaacggcguggucuacgagagcacgaacaacaacgacuucuggaccgcgguguccagcguggagccccacgucucccagaccaaccggcaguacauccuguucggggagaacaagcaguucaacguggagaacaacagcgacaaguggaaguucuucgagaccuucacgggcuccagccaggggaacuucuccaaccgccggacccucaccagcuccaaccgccuggugggcaugcugaaguacggcgggcgggucuggaccuuccacggcgagacgccccgcgccaccaccgacagcuccaacaccgccgaccucaacaacaucagcaucaucauccacuccgaguucuacaucaucccccggagccaggaguccaagugcaacgaguacaucaacaacgggcug

SEQ ID NO: 291 - RNA, 549 nt, Artificial Sequence; identical to SEQ ID NO: 290
  derived and/or modified CDS sequence (opt1) from RVA/DS-1/P[4]__ABV53252.1__VP8*(41-223)

SEQ ID NO: 292 - RNA, 549 nt, Artificial Sequence
  derived and/or modified CDS sequence (opt1) from RVA/F01322/P[6]__AFA51886.1__VP8*(41-223)
gcccagaccaacuacgcccccgugaccuggagccacggcgaggucaacgacuccacgaccaucgagccggugcuggacgggcccuaccagcccaccaacuucaagcccccgaacgacuacuggauccuccugaaccccaccaaccagcaggucgugcuggagggcacgaacaagaccgacaucuggguggcgcuccugcugguggagcccaacgucaccaaccagagccgccaguacacccucuucggggagacgaagcagaucaccguggagaacaacaccaacaaguggaaguucuucgagauguuccgguccagcguguccgccgaguuccagcacaagcgcacccugacgagcgacaccaagcuggccggcuucaugaaguucuacaacuccgucuggaccuuccacggggagacccccaacgccacgaccgacuacagcuccaccagcaaccucuucgagguggagaccgugauccacgucgaguucuacaucaucccgcggucccaggagagcaagugcuccgaguacaucaacacgggccug

SEQ ID NO: 293 - RNA, 549 nt, Artificial Sequence
  derived and/or modified CDS sequence (opt1) from RVA/1076/P[6]__AAA47337.1__VP8*(41-223)
gcccagaccaacuacgcccccgugaccuggagccacggcgaggucaacgacuccacgaccaucgagccggugcuggacgggcccuaccagcccaccagcuucaagcccccguccgacuacuggauccuccugaaccccaccaaccagcaggucgugcuggagggcacgaacaagaccgacaucuggguggcgcuccugcugguggagcccaacgucaccaaccagagccgccaguacacccucuucggggagacgaagcagaucaccguggagaacaacaccaacaaguggaaguucuucgagauguuccgguccagcguguccgccgaguuccagcacaagcgcacccugacgagcgacaccaagcuggccggcuuccucaaguucuacaacuccgucuggaccuucuacggggagacgccccacgccaccaccgacuacagcuccaccagcaaccuguccgagguggagaccgccauccacguggaguucuacaucaucccgcggagccaggaguccaagugcaacgaguacaucaacacgggccug

SEQ ID NO: 294 - RNA, 549 nt, Artificial Sequence
  derived and/or modified CDS sequence (opt1) from RVA/BE1128/P[8]__AEX30671.1__VP8*(41-223)
gcccagacccgcuacgcccccgugaacuggggccacggggagaucaacgacagcaccacggucgagccgauccuggacggccccuaccagcccaccaccuucacgcccccgaccgacuacuggauccucaucaccuccaacaccaacggggugguguacgagagcaccaacaacuccgacuucuggacggcggucaucgccguggagccccacgugaaccccgucgaccggcaguacaacguguucggcgagaacaagcaguucaacgugcgcaacgacagcgacaaguggaaguuccuggagauguuccggggguccagccagaacgacuucuacaaccgccggacccugaccuccgacacccgccucgucggcauccugaaguacggcgggcggguguggacguuccacggcgagacgccccgcgccaccaccgacagcuccaacaccgccaaccuggacgggaucagcaucaccauccacuccgaguucuacaucaucccgcggagccaggaguccaagugcaacgaguacaucaacaacggccuc

SEQ ID NO: 295 - RNA, 549 nt, Artificial Sequence
  derived and/or modified CDS sequence (opt1) from RVA/Wa-VirWa/P[8]__ACR22783.1__VP8*(41-223)
gcccagacccgcuacgcccccgugaacuggggccacggggagaucaacgacagcaccacggucgagccgauccuggacggccccuaccagcccaccaccuucacgcccccgaacgacuacuggauccucaucaacuccaacaccaacggggugguguacgagagcaccaacaacuccgacuucuggaccgcggucguggccaucgagccccacgugaaccccgucgaccggcaguacaccaucuucggcgagagcaagcaguucaacgugcgcaacgacuccaacaaguggaaguuccuggagauguuccggagcuccagccagaacgaguucuacaaccgccggacgcugaccuccgacacccgccucguggggauccugaaguacggcggccgggucuggaccuuccacggggagacgccccgcgccaccaccgacagcuccagcaccgccaaccugaacaacaucuccaucacgauccacagcgaguucuacaucaucccgcggucccaggagagcaagugcaacgaguacaucaacaacggccuc

SEQ ID NO: 296 - RNA, 549 nt, Artificial Sequence
  derived and/or modified CDS sequence (opt1) from RVA/Wa/P[8]__AAA47290.1__VP8*(41-223)
gcccagacccgcuacgcccccgugaacuggggccacggggagaucaacgacagcaccacggucgagccgauccuggacggccccuaccagcccaccaccuucacgcccccgaacgacuacuggauccucaucaacuccaacaccaacggggugguguacgagagcaccaacaacuccgacuucuggaccgcggucguggccaucgagccccacgugaaccccgucgaccggcaguacaccaucuucggcgagagcaagcaguucaacguguccaacgacagcaacaaguggaaguuccuggagauguuccgcuccagcucccagaacgaguucuacaaccggcgcacgcugaccagcgacacccgguucguggggauccucaaguacggcggccgcgucuggaccuuccacggggagacgccccgggccaccaccgacuccagcuccaccgccaaccugaacaacaucagcaucacgauccacuccgaguucuacaucaucccgcgcagccaggaguccaagugcaacgaguacaucaacaacggccug

SEQ ID NO: 297 - RNA, 549 nt, Artificial Sequence
  derived and/or modified CDS sequence (opt1) from RVA/Wa/P[8]__AAA66953.1__VP8*(41-223)
gcccagacccgcuacgcccccgugaacuggggccacggggagaucaacgacagcaccacggucgagccgaugcuggacggccccuaccagcccaccaccuucacgcccccgaacgacuacuggauccucaucaacuccaacaccaacggggugguguacgagagcaccaacaacuccgacuucuggaccgcggucguggccaucgagccccacgugaaccccgucgaccggcaguacaccaucuucggcgagagcaagcaguucaacguguccaacgacagcaacaaguggaaguuccuggagauguuccgcuccagcucccagaacgaguucuacaaccggcgcacgcugaccagcgacacccgguucguggggauccucaaguacggcggccgcgucuggaccuuccacggggagacgccccgggccaccaccgacuccagcuccaccgccaaccugaacaacaucagcaucacgauccacuccgaguucuacaucaucccgcgcagccaggaguccaagugcaacgaguacaucaacaacggccug

SEQ ID NO: 298 - RNA, 543 nt, Artificial Sequence
  derived and/or modified CDS sequence (opt1) from RVA/BE1058/P[4]__AEX30665.1__P2_VP8*(65-223)
augcaguacaucaaggccaacagcaaguucaucggcaucaccgagcugggguccggcagcgggcucgacggccccuaccagccgaccacguucaagccgcccaacgacuacuggcugcugaucuccagcaacaccgacgggguggucuacgaguccaccaacaacagcgacuucuggaccgccgugaucgcgguggagccccacgucaaccagacgaaccgccaguacguccucuucggcgagaacaagcaguucaacaucgagaacuccagcgacaaguggaaguucuucgagauguucaagggcaacucccagagcgacuucuccaaccggcgcacccugaccagcuccaaccggcugguggggaugcucaaguacggcgggcgcguguggaccuuccacggcgagacgccccgggccaccaccgacagcuccagcaccgccgaccugaacaacaucuccaucaucauccacagcgaguucuacaucaucccccgcucccaggagagcaagugcaacgaguacaucaacaacgggcuguga

SEQ ID NO: 299 - RNA, 543 nt, Artificial Sequence
  derived and/or modified CDS sequence (opt1) from RVA/DS-1/P[4]__CAD62680.1__P2_VP8*(65-223)
augcaguacaucaaggccaacagcaaguucaucggcaucaccgagcugggguccggcagcgggcucgacggccccuaccagccgaccacguucaagccgcccaacgacuacuggcugcugaucuccagcaacaccaacgggguggucuacgaguccaccaacaacaacgacuucuggaccgccgugagcuccguggagccccacgucagccagacgaaccgccaguacauccucuucggcgagaacaagcaguucaacguggagaacaacuccgacaaguggaaguucuucgagaccuucaccggcagcucccaggggaacuucagcaaccggcgcacccugacguccagcaaccggcuggugggcaugcucaaguacgggggccgcgucuggaccuuccacggggagacgccccgggcgaccaccgacuccagcaacaccgccgaccugaacaacaucuccaucaucauccacagcgaguucuacaucaucccccgcucccaggagagcaagugcaacgaguacaucaacaacggccuguga

SEQ ID NO: 300 - RNA, 543 nt, Artificial Sequence; identical to SEQ ID NO: 299
  derived and/or modified CDS sequence (opt1) from RVA/DS-1/P[4]__ABV53252.1__P2_VP8*(65-223)

SEQ ID NO: 301 - RNA, 543 nt, Artificial Sequence
  derived and/or modified CDS sequence (opt1) from RVA/F01322/P[6]__AFA51886.1__P2_VP8*(65-223)
augcaguacaucaaggccaacagcaaguucaucggcaucaccgagcugggguccggcagcgggcucgacggccccuaccagccgaccaacuucaagccgcccaacgacuacuggauccugcugaaccccacgaaccagcaggucgugcucgaggggaccaacaagaccgacaucuggguggcccugcugcucguggagcccaacgucaccaaccagucccgccaguacacgcuguucggcgagaccaagcagaucaccguggagaacaacaccaacaaguggaaguucuucgagauguuccggagcuccgugagcgcggaguuccagcacaagcgcacgcugaccuccgacaccaagcucgccggcuucaugaaguucuacaacagcgucuggaccuuccacggggagacgcccaacgccaccaccgacuacuccagcaccuccaaccuguucgagguggagacggugauccacgucgaguucuacaucaucccccggagccaggaguccaagugcagcgaguacaucaacaccggccuguga

SEQ ID NO: 302 - RNA, 543 nt, Artificial Sequence
  derived and/or modified CDS sequence (opt1) from RVA/1076/P[6]__AAA47337.1__P2_VP8*(65-223)
augcaguacaucaaggccaacagcaaguucaucggcaucaccgagcugggguccggcagcgggcucgacggccccuaccagccgaccuccuucaagccgcccagcgacuacuggauccugcugaaccccacgaaccagcaggucgugcucgaggggaccaacaagaccgacaucuggguggcccugcugcucguggagcccaacgucaccaaccagucccgccaguacacgcuguucggcgagaccaagcagaucaccguggagaacaacaccaacaaguggaaguucuucgagauguuccggagcuccgugagcgcggaguuccagcacaagcgcacgcugaccuccgacaccaagcucgccggcuuccugaaguucuacaacagcgucuggaccuucuacggggagacgccccacgccaccaccgacuacuccagcaccuccaaccugagcgagguggagacggccauccacguggaguucuacaucaucccccggucccaggagagcaagugcaacgaguacaucaacaccggccucuga

SEQ ID NO: 303 - RNA, 543 nt, Artificial Sequence
  derived and/or modified CDS sequence (opt1) from RVA/BE1128/P[8]__AEX30671.1__P2_VP8*(65-223)
augcaguacaucaaggccaacagcaaguucaucggcaucaccgagcugggguccggcagcgggcucgacggccccuaccagccgaccacguucaccccgcccaccgacuacuggauccugaucaccuccaacacgaacgggguggucuacgagagcaccaacaacuccgacuucuggaccgccgugaucgcgguggagccccacgucaaccccguggaccgccaguacaacguguucggcgagaacaagcaguucaacguccggaacgacagcgacaaguggaaguuccuggagauguuccgcggcuccagccagaacgacuucuacaaccggcgcacccucacguccgacacccggcugguggggauccugaaguacggcgggcgcguguggaccuuccacggcgagacgccccgggccaccaccgacagcuccaacaccgccaaccucgacgggaucagcaucaccauccacuccgaguucuacaucaucccccgcagccaggaguccaagugcaacgaguacaucaacaacggccuguga

SEQ ID NO: 304 - RNA, 543 nt, Artificial Sequence
  derived and/or modified CDS sequence (opt1) from RVA/Wa-VirWa/P[8]__ACR22783.1__P2_VP8*(65-223)
augcaguacaucaaggccaacagcaaguucaucggcaucaccgagcugggguccggcagcgggcucgacggccccuaccagccgaccacguucaccccgcccaacgacuacuggauccugaucaacuccaacaccaacgggguggucuacgagagcaccaacaacuccgacuucuggacggccgugguggcgaucgagccccacgucaaccccguggaccgccaguacaccaucuucggcgagagcaagcaguucaacgugcggaacgacuccaacaaguggaaguuccuggagauguuccgcagcuccagccagaacgaguucuacaaccggcgcacccucaccuccgacacgcggcuggucggcauccugaaguacgggggccgcguguggaccuuccacggggagacgccccgggccaccaccgacagcuccagcaccgccaaccucaacaacaucuccaucaccauccacagcgaguucuacaucaucccccgcucccaggagagcaagugcaacgaguacaucaacaacggccuguga

SEQ ID NO: 305 - RNA, 543 nt, Artificial Sequence
  derived and/or modified CDS sequence (opt1) from RVA/Wa/P[8]__AAA47290.1__P2_VP8*(65-223)
augcaguacaucaaggccaacagcaaguucaucggcaucaccgagcugggguccggcagcgggcucgacggccccuaccagccgaccacguucaccccgcccaacgacuacuggauccugaucaacuccaacaccaacgggguggucuacgagagcaccaacaacuccgacuucuggacggccgugguggcgaucgagccccacgucaaccccguggaccgccaguacaccaucuucggcgagagcaagcaguucaacguguccaacgacagcaacaaguggaaguuccuggagauguuccgguccagcucccagaacgaguucuacaaccgccggacccucaccagcgacacgcgcuucgucggcauccugaaguacgggggccggguguggaccuuccacggggagacgccccgcgccaccaccgacuccagcuccaccgccaaccugaacaacaucagcaucaccauccacuccgaguucuacaucaucccccggagccaggaguccaagugcaacgaguacaucaacaacggccucuga

SEQ ID NO: 306 - RNA, 543 nt, Artificial Sequence; identical to SEQ ID NO: 305
  derived and/or modified CDS sequence (opt1) from RVA/Wa/P[8]__AAA66953.1__P2_VP8*(65-223)

SEQ ID NO: 307 - RNA, 615 nt, Artificial Sequence
  derived and/or modified CDS sequence (opt1) from RVA/BE1058/P[4]__AEX30665.1__P2_VP8*(41-223)
augcaguacaucaaggccaacagcaaguucaucggcaucaccgagcugggguccggcagcggggcccagacccgcuacgcgcccgugaacuggggccacggggagaucaacgacuccacgaccgucgagccggugcucgacggccccuaccagcccaccaccuucaagcccccgaacgacuacuggcugcugaucagcuccaacacggacggcguggucuacgagagcaccaacaacuccgacuucuggaccgccgugaucgccguggagccccacgucaaccagaccaaccggcaguacguccucuucggggagaacaagcaguucaacaucgagaacagcuccgacaaguggaaguucuucgagauguucaagggcaacagccaguccgacuucagcaaccgccggacgcugaccuccagcaaccgccugguggggaugcucaaguacggcgggcggguguggaccuuccacggcgagacgccccgcgccaccaccgacuccagcuccaccgccgaccugaacaacaucagcaucaucauccacuccgaguucuacaucaucccccggagccaggagagcaagugcaacgaguacaucaacaacggccuguga

SEQ ID NO: 308 - RNA, 615 nt, Artificial Sequence
  derived and/or modified CDS sequence (opt1) from RVA/DS-1/P[4]__CAD62680.1__P2_VP8*(41-223)
augcaguacaucaaggccaacagcaaguucaucggcaucaccgagcugggguccggcagcggggcccagacccgcuacgcgcccgugaacuggggcuccugggagaucaacgacagcacgaccgucgagccggugcucgacgggcccuaccagcccaccaccuucaagcccccgaacgacuacuggcugcugaucuccagcaacacgaacggcguggucuacgaguccaccaacaacaacgacuucuggaccgccgugagcuccguggagccccacgucagccagaccaaccggcaguacauccucuucggcgagaacaagcaguucaacguggagaacaacuccgacaaguggaaguucuucgagacguucaccgggagcucccagggcaacuucagcaaccgccggacccugaccuccagcaaccgccugguggggaugcucaaguacggcgggcgggucuggacguuccacggcgagacgccccgcgccaccaccgacuccagcaacaccgccgaccugaacaacaucuccaucaucauccacagcgaguucuacaucaucccccggagccaggaguccaagugcaacgaguacaucaacaacggccuguga

SEQ ID NO: 309 - RNA, 615 nt, Artificial Sequence; identical to SEQ ID NO: 308
  derived and/or modified CDS sequence (opt1) from RVA/DS-1/P[4]__ABV53252.1__P2_VP8*(41-223)

SEQ ID NO: 310 - RNA, 615 nt, Artificial Sequence
  derived and/or modified CDS sequence (opt1) from RVA/F01322/P[6]__AFA51886.1__P2_VP8*(41-223)
augcaguacaucaaggccaacagcaaguucaucggcaucaccgagcugggguccggcagcggggcccagaccaacuacgcgcccgugacguggucccacggcgaggucaacgacagcaccaccaucgagccggugcucgacgggcccuaccagcccaccaacuucaagcccccgaacgacuacuggauccugcugaaccccacgaaccagcaggucgugcucgagggcaccaacaagaccgacaucuggguggcccugcugcucguggagcccaacgucaccaaccagucccgccaguacacgcuguucggcgagaccaagcagaucaccguggagaacaacaccaacaaguggaaguucuucgagauguuccggagcuccgugagcgccgaguuccagcacaagcgcacgcugaccuccgacaccaagcucgccggguucaugaaguucuacaacagcgucuggaccuuccacggcgagacgcccaacgccaccaccgacuacuccagcaccuccaaccuguucgagguggagacggugauccacgucgaguucuacaucaucccgcggagccaggaguccaagugcagcgaguacaucaacaccgggcuguga

SEQ ID NO: 311 - RNA, 615 nt, Artificial Sequence
  derived and/or modified CDS sequence (opt1) from RVA/1076/P[6]__AAA47337.1__P2_VP8*(41-223)
augcaguacaucaaggccaacagcaaguucaucggcaucaccgagcugggguccggcagcggggcccagaccaacuacgcgcccgugacguggucccacggcgaggucaacgacagcaccaccaucgagccggugcucgacgggcccuaccagcccaccuccuucaagcccccgagcgacuacuggauccugcugaaccccacgaaccagcaggucgugcucgagggcaccaacaagaccgacaucuggguggcccugcugcucguggagcccaacgucaccaaccagucccgccaguacacgcuguucggcgagaccaagcagaucaccguggagaacaacaccaacaaguggaaguucuucgagauguuccggagcuccgugagcgccgaguuccagcacaagcgcacgcugaccuccgacaccaagcucgccggguuccugaaguucuacaacagcgucuggaccuucuacggcgagacgccccacgccaccaccgacuacuccagcaccuccaaccugagcgagguggagacggcgauccacguggaguucuacaucaucccgcggucccaggagagcaagugcaacgaguacaucaacaccgggcucuga

SEQ ID NO: 312 - RNA, 615 nt, Artificial Sequence
  derived and/or modified CDS sequence (opt1) from RVA/BE1128/P[8]__AEX30671.1__P2_VP8*(41-223)
augcaguacaucaaggccaacagcaaguucaucggcaucaccgagcugggguccggcagcggggcccagacccgcuacgcgcccgugaacuggggccacggggagaucaacgacuccacgaccgucgagccgauccucgacggccccuaccagcccaccaccuucacgcccccgaccgacuacuggauccugaucaccagcaacaccaacggcgugguguacgaguccacgaacaacagcgacuucuggaccgccgucaucgccguggagccccacgugaaccccgucgaccggcaguacaacguguucggggagaacaagcaguucaacgugcgcaacgacuccgacaaguggaaguuccuggagauguuccggggcagcucccagaacgacuucuacaaccgccggacccucaccagcgacacgcgccuggucgggauccugaaguacggcgggcggguguggaccuuccacggcgagacgccccgcgccaccaccgacuccagcaacaccgccaaccucgacggcaucuccaucaccauccacagcgaguucuacaucaucccgcggucccaggagagcaagugcaacgaguacaucaacaacgggcuguga

SEQ ID NO: 313 - RNA, 615 nt, Artificial Sequence
  derived and/or modified CDS sequence (opt1) from RVA/Wa-VirWa/P[8]__ACR22783.1__P2_VP8*(41-223)
augcaguacaucaaggccaacagcaaguucaucggcaucaccgagcugggguccggcagcggggcccagacccgcuacgcgcccgugaacuggggccacggggagaucaacgacuccacgaccgucgagccgauccucgacggccccuaccagcccaccaccuucacgcccccgaacgacuacuggauccugaucaacagcaacaccaacggcgugguguacgaguccaccaacaacagcgacuucuggaccgccgucguggccaucgagccccacgugaaccccgucgaccggcaguacacgaucuucggggaguccaagcaguucaacgugcgcaacgacagcaacaaguggaaguuccuggagauguuccgguccagcucccagaacgaguucuacaaccgccggacccucaccagcgacacccgccuggugggcauccugaaguacgggggccgggucuggacguuccacggggagacgccccgcgccaccaccgacuccagcuccaccgccaaccucaacaacaucagcaucaccauccacuccgaguucuacaucaucccgcggagccaggaguccaagugcaacgaguacaucaacaacggccuguga

SEQ ID NO: 314 - RNA, 615 nt, Artificial Sequence
  derived and/or modified CDS sequence (opt1) from RVA/Wa/P[8]__AAA47290.1__P2_VP8*(41-223)
augcaguacaucaaggccaacagcaaguucaucggcaucaccgagcugggguccggcagcggggcccagacccgcuacgcgcccgugaacuggggccacggggagaucaacgacuccacgaccgucgagccgauccucgacggccccuaccagcccaccaccuucacgcccccgaacgacuacuggauccugaucaacagcaacaccaacggcgugguguacgaguccaccaacaacagcgacuucuggaccgccgucguggccaucgagccccacgugaaccccgucgaccggcaguacacgaucuucggggaguccaagcaguucaacgugagcaacgacuccaacaaguggaaguuccuggagauguuccgcagcuccagccagaacgaguucuacaaccggcgcacccucaccuccgacacccgguucgugggcauccugaaguacgggggccgcgucuggacguuccacggggagacgccccgggccaccaccgacagcuccagcaccgccaaccugaacaacaucuccaucaccauccacagcgaguucuacaucaucccgcgcucccaggagagcaagugcaacgaguacaucaacaacggccucuga

SEQ ID NO: 315 - RNA, 615 nt, Artificial Sequence
  derived and/or modified CDS sequence (opt1) from RVA/Wa/P[8]__AAA66953.1__P2_VP8*(41-223)
augcaguacaucaaggccaacagcaaguucaucggcaucaccgagcugggguccggcagcggggcccagacccgcuacgcgcccgugaacuggggccacggggagaucaacgacuccacgaccgucgagccgaugcucgacggccccuaccagcccaccaccuucacgcccccgaacgacuacuggauccugaucaacagcaacaccaacggcgugguguacgaguccaccaacaacagcgacuucuggaccgccgucguggccaucgagccccacgugaaccccgucgaccggcaguacacgaucuucggggaguccaagcaguucaacgugagcaacgacuccaacaaguggaaguuccuggagauguuccgcagcuccagccagaacgaguucuacaaccggcgcacccucaccuccgacacccgguucgugggcauccugaaguacgggggccgcgucuggacguuccacggggagacgccccgggccaccaccgacagcuccagcaccgccaaccugaacaacaucuccaucaccauccacagcgaguucuacaucaucccgcgcucccaggagagcaagugcaacgaguacaucaacaacggccucuga

SEQ ID NO: 316 - RNA, 1041 nt, Artificial Sequence
  derived and/or modified CDS sequence (opt1) from RVA/BE1058/P[4]__AEX30665.1__P2_VP8*(65-223)_Ferritin
augcaguacaucaaggccaacagcaaguucaucggcaucaccgagcugggguccggcagcgggcucgacggccccuaccagccgaccacguucaagccgcccaacgacuacuggcugcugaucuccagcaacaccgacgggguggucuacgaguccaccaacaacagcgacuucuggaccgccgugaucgcgguggagccccacgucaaccagacgaaccgccaguacguccucuucggcgagaacaagcaguucaacaucgagaacuccagcgacaaguggaaguucuucgagauguucaagggcaacucccagagcgacuucuccaaccggcgcacccugaccagcuccaaccggcugguggggaugcucaaguacggcgggcgcguguggaccuuccacggcgagacgccccgggccaccaccgacagcuccagcaccgccgaccugaacaacaucuccaucaucauccacagcgaguucuacaucaucccccgcucccaggagagcaagugcaacgaguacaucaacaacgggcugagcggcggcgacaucaucaagcuccugaacgagcaggucaacaaggagaugcaguccagcaaccuguacauguccaugagcuccuggugcuacacgcacagccucgacggggccggccuguuccuguucgaccacgccgcggaggaguacgagcacgccaagaagcucaucaucuuccugaacgagaacaacgugcccgugcagcugaccuccaucagcgcccccgagcacaaguucgaggggcucacccagaucuuccagaaggccuacgagcacgagcagcacaucuccgagagcaucaacaacaucguggaccacgcgaucaaguccaaggaccacgccaccuucaacuuccugcagugguacguggccgagcagcacgaggaggagguccuguucaaggacauccucgacaagaucgagcugaucggcaacgagaaccacggccuguaccucgccgaccaguacgugaaggggaucgccaagagccggaaguccuga

SEQ ID NO: 317 - RNA, 1041 nt, Artificial Sequence
  derived and/or modified CDS sequence (opt1) from RVA/DS-1/P[4]__CAD62680.1__P2_VP8*(65-223)_Ferritin
augcaguacaucaaggccaacagcaaguucaucggcaucaccgagcugggguccggcagcgggcucgacggccccuaccagccgaccacguucaagccgcccaacgacuacuggcugcugaucuccagcaacaccaacgggguggucuacgaguccaccaacaacaacgacuucuggaccgccgugagcuccguggagccccacgucagccagacgaaccgccaguacauccucuucggcgagaacaagcaguucaacguggagaacaacuccgacaaguggaaguucuucgagaccuucaccggcagcucccaggggaacuucagcaaccggcgcacccugacguccagcaaccggcuggugggcaugcucaaguacgggggccgcgucuggaccuuccacggggagacgccccgggcgaccaccgacuccagcaacaccgccgaccugaacaacaucuccaucaucauccacagcgaguucuacaucaucccccgcucccaggagagcaagugcaacgaguacaucaacaacggccugagcggcggggacaucaucaagcuccugaacgagcaggucaacaaggagaugcaguccagcaaccuguacauguccaugagcuccuggugcuacacccacagccucgacggcgccgggcuguuccuguucgaccacgccgccgaggaguacgagcacgcgaagaagcucaucaucuuccugaacgagaacaacgugcccgugcagcugaccuccaucagcgcccccgagcacaaguucgagggccucacgcagaucuuccagaaggccuacgagcacgagcagcacaucuccgagagcaucaacaacaucguggaccacgccaucaaguccaaggaccacgcgaccuucaacuuccugcagugguacguggccgagcagcacgaggaggagguccuguucaaggacauccucgacaagaucgagcugaucggcaacgagaaccacgggcuguaccucgccgaccaguacgugaagggcaucgccaagagccggaaguccuga

SEQ ID NO: 318 - RNA, 1041 nt, Artificial Sequence; identical to SEQ ID NO: 317
  derived and/or modified CDS sequence (opt1) from RVA/DS-1/P[4]__ABV53252.1__P2_VP8*(65-223)_Ferritin

SEQ ID NO: 319 - RNA, 1041 nt, Artificial Sequence
  derived and/or modified CDS sequence (opt1) from RVA/F01322/P[6]__AFA51886.1__P2_VP8*(65-223)_Ferritin
augcaguacaucaaggccaacagcaaguucaucggcaucaccgagcugggguccggcagcgggcucgacggccccuaccagccgaccaacuucaagccgcccaacgacuacuggauccugcugaaccccacgaaccagcaggucgugcucgaggggaccaacaagaccgacaucuggguggcccugcugcucguggagcccaacgucaccaaccagucccgccaguacacgcuguucggcgagaccaagcagaucaccguggagaacaacaccaacaaguggaaguucuucgagauguuccggagcuccgugagcgcggaguuccagcacaagcgcacgcugaccuccgacaccaagcucgccggcuucaugaaguucuacaacagcgucuggaccuuccacggggagacgcccaacgccaccaccgacuacuccagcaccuccaaccuguucgagguggagacggugauccacgucgaguucuacaucaucccccggagccaggaguccaagugcagcgaguacaucaacaccggccuguccgggggcgacaucaucaagcuccugaacgagcaggucaacaaggagaugcagagcuccaaccuguacaugagcauguccagcuggugcuacacccacagccucgacggggccggccuguuccuguucgaccacgccgcggaggaguacgagcacgccaagaagcucaucaucuuccugaacgagaacaacgugcccgugcagcugaccuccaucagcgccccggagcacaaguucgagggccucacgcagaucuuccagaaggccuacgagcacgagcagcacaucuccgagagcaucaacaacaucguggaccacgcgaucaaguccaaggaccacgccaccuucaacuuccugcagugguacguggccgagcagcacgaggaggagguccuguucaaggacauccucgacaagaucgagcugaucgggaacgagaaccacggccuguaccucgccgaccaguacgugaaggggaucgccaagagccgcaaguccuga

SEQ ID NO: 320 - RNA, 1041 nt, Artificial Sequence
  derived and/or modified CDS sequence (opt1) from RVA/1076/P[6]__AAA47337.1__P2_VP8*(65-223)_Ferritin
augcaguacaucaaggcgaacagcaaguucaucggcaucaccgagcugggguccggcagcgggcucgacggccccuaccagccgaccuccuucaagccgcccagcgacuacuggauccugcugaaccccacgaaccagcaggucgugcucgaggggaccaacaagaccgacaucuggguggcccugcugcucguggagcccaacgucaccaaccagucccgccaguacacgcuguucggcgagaccaagcagaucaccguggagaacaacaccaacaaguggaaguucuucgagauguuccggagcuccgugagcgcggaguuccagcacaagcgcacgcugaccuccgacaccaagcucgccggcuuccugaaguucuacaacagcgucuggaccuucuacggggagacgccccacgccaccaccgacuacuccagcaccuccaaccugagcgagguggagacggccauccacguggaguucuacaucaucccccggucccaggagagcaagugcaacgaguacaucaacaccggccucuccgggggcgacaucaucaagcugcugaacgagcaggucaacaaggagaugcagagcuccaaccucuacaugagcaugagcuccuggugcuacacccacagccuggacggggccggccuguuccucuucgaccacgcggccgaggaguacgagcacgccaagaagcugaucaucuuccugaacgagaacaacgugcccgugcagcucaccuccaucagcgccccggagcacaaguucgagggccugacgcagaucuuccagaaggcguacgagcacgagcagcacaucuccgagagcaucaacaacaucgucgaccacgccaucaaguccaaggaccacgccaccuucaacuuccugcagugguacguggccgagcagcacgaggaggagguccucuucaaggacauccuggacaagaucgagcugaucgggaacgagaaccacggccucuaccuggccgaccaguacgugaaggggaucgccaagagccgcaaguccuga

SEQ ID NO: 321 - RNA, 1041 nt, Artificial Sequence
  derived and/or modified CDS sequence (opt1) from RVA/BE1128/P[8]__AEX30671.1__P2_VP8*(65-223)_Ferritin
augcaguacaucaaggccaacagcaaguucaucggcaucaccgagcugggguccggcagcgggcucgacggccccuaccagccgaccacguucaccccgcccaccgacuacuggauccugaucaccuccaacacgaacgggguggucuacgagagcaccaacaacuccgacuucuggaccgccgugaucgcgguggagccccacgucaaccccguggaccggcaguacaacguguucggcgagaacaagcaguucaacguccggaacgacagcgacaaguggaaguuccuggagauguuccgcggcuccagccagaacgacuucuacaaccggcgcacccucacguccgacacccggcugguggggauccugaaguacggcgggcgcguguggaccuuccacggcgagacgccccgggccaccaccgacagcuccaacaccgccaaccucgacgggaucagcaucaccauccacuccgaguucuacaucaucccccgcagccaggaguccaagugcaacgaguacaucaacaacggccugagcggcggggacaucaucaagcugcucaacgagcaggucaacaaggagaugcaguccagcaaccuguacauguccaugagcagcuggugcuacacgcacucccuggacggcgccggccucuuccuguucgaccacgccgcggaggaguacgagcacgccaagaagcugaucaucuuccucaacgagaacaacgugcccgugcagcugaccagcaucuccgccccggagcacaaguucgaggggcugacccagaucuuccagaaggccuacgagcacgagcagcacaucagcgaguccaucaacaacaucgucgaccacgcgaucaagagcaaggaccacgccaccuucaacuuccuccagugguacguggccgagcagcacgaggaggaggugcuguucaaggacauccuggacaagaucgagcucaucggcaacgagaaccacgggcuguaccuggccgaccaguacgucaagggcaucgccaagucccgcaagagcuga

SEQ ID NO: 322 - RNA, 1041 nt, Artificial Sequence
  derived and/or modified CDS sequence (opt1) from RVA/Wa-VirWa/P[8]__ACR22783.1__P2_VP8*(65-223)_Ferritin
augcaguacaucaaggccaacagcaaguucaucggcaucaccgagcugggguccggcagcgggcucgacggccccuaccagccgaccacguucaccccgcccaacgacuacuggauccugaucaacuccaacaccaacgggguggucuacgagagcaccaacaacuccgacuucuggacggccgugguggcgaucgagccccacgucaaccccguggaccgccaguacaccaucuucggcgagagcaagcaguucaacgugcggaacgacuccaacaaguggaaguuccuggagauguuccgcagcuccagccagaacgaguucuacaaccggcgcacccucaccuccgacacgcggcuggucggcauccugaaguacgggggccgcguguggaccuuccacggggagacgccccgggccaccaccgacagcuccagcaccgccaaccucaacaacaucuccaucaccauccacagcgaguucuacaucaucccccgcucccaggagagcaagugcaacgaguacaucaacaacggccuguccgggggcgacaucaucaagcugcucaacgagcaggucaacaaggagaugcagagcagcaaccuguacauguccaugagcuccuggugcuacacccacagccuggacggcgccggccucuuccuguucgaccacgccgcggaggaguacgagcacgccaagaagcugaucaucuuccucaacgagaacaacgugcccgugcagcugacguccaucagcgccccggagcacaaguucgaggggcugacccagaucuuccagaaggccuacgagcacgagcagcacaucuccgagagcaucaacaacaucguggaccacgcgaucaaguccaaggaccacgccaccuucaacuuccuccagugguacgucgccgagcagcacgaggaggaggugcuguucaaggacauccuggacaagaucgagcucaucgggaacgagaaccacggccuguaccuggccgaccaguacgugaagggcaucgccaagagccggaaguccuga

SEQ ID NO: 323 - RNA, 1041 nt, Artificial Sequence
  derived and/or modified CDS sequence (opt1) from RVA/Wa/P[8]__AAA47290.1__P2_VP8*(65-223)_Ferritin
augcaguacaucaaggccaacagcaaguucaucggcaucaccgagcugggguccggcagcgggcucgacggccccuaccagccgaccacguucaccccgcccaacgacuacuggauccugaucaacuccaacaccaacggggugguguacgagagcaccaacaacuccgacuucuggacggccgugguggcgaucgagccccacgucaaccccguggaccgccaguacaccaucuucggcgagagcaagcaguucaacguguccaacgacagcaacaaguggaaguuccuggagauguuccgguccagcucccagaacgaguucuacaaccgccggacccucaccagcgacacgcgcuucgucggcauccugaaguacgggggccggguguggaccuuccacggggagacgccccgcgccaccaccgacuccagcuccaccgccaaccugaacaacaucagcaucaccauccacuccgaguucuacaucaucccccggagccaggaguccaagugcaacgaguacaucaacaacggccucagcgggggcgacaucaucaagcugcugaacgagcaggucaacaaggagaugcagagcuccaaccucuacaugagcauguccagcuggugcuacacccacucccuggacggcgccgggcuguuccucuucgaccacgccgcggaggaguacgagcacgccaagaagcugaucaucuuccugaacgagaacaacgugcccgugcagcucacgagcaucuccgccccggagcacaaguucgagggccugacccagaucuuccagaaggccuacgagcacgagcagcacaucagcgaguccaucaacaacaucguggaccacgcgaucaagagcaaggaccacgccaccuucaacuuccugcagugguacgucgccgagcagcacgaggaggagguccucuucaaggacauccuggacaagaucgagcugaucgggaacgagaaccacggccucuaccuggccgaccaguacgugaagggcaucgccaagucccgcaagagcuga

SEQ ID NO: 324 - RNA, 1041 nt, Artificial Sequence; identical to SEQ ID NO: 323
  derived and/or modified CDS sequence (opt1) from RVA/Wa/P[8]__AAA66953.1__P2_VP8*(65-223)_Ferritin

SEQ ID NO: 325 - RNA, 1113 nt, Artificial Sequence
  derived and/or modified CDS sequence (opt1) from RVA/BE1058/P[4]__AEX30665.1__P2_VP8*(41-223)_Ferritin
augcaguacaucaaggccaacagcaaguucaucggcaucaccgagcugggguccggcagcggggcccagacccgcuacgcgcccgugaacuggggccacggggagaucaacgacuccacgaccgucgagccggugcucgacggccccuaccagcccaccaccuucaagcccccgaacgacuacuggcugcugaucagcuccaacacggacggcguggucuacgagagcaccaacaacuccgacuucuggaccgccgugaucgccguggagccccacgucaaccagaccaaccggcaguacguccucuucggggagaacaagcaguucaacaucgagaacagcuccgacaaguggaaguucuucgagauguucaagggcaacagccaguccgacuucagcaaccgccggacgcugaccuccagcaaccgccugguggggaugcucaaguacggcgggcggguguggaccuuccacggcgagacgccccgcgccaccaccgacuccagcuccaccgccgaccugaacaacaucagcaucaucauccacuccgaguucuacaucaucccccggagccaggagagcaagugcaacgaguacaucaacaacggccuguccgggggcgacaucaucaagcuccugaacgagcaggucaacaaggagaugcagagcuccaaccuguacaugagcauguccagcuggugcuacacccacucccucgacggggcgggccuguuccuguucgaccacgccgccgaggaguacgagcacgccaagaagcucaucaucuuccugaacgagaacaacgugccggugcagcugacgagcaucuccgcgcccgagcacaaguucgagggccucacccagaucuuccagaaggccuacgagcacgagcagcacaucagcgaguccaucaacaacaucguggaccacgccaucaagagcaaggaccacgccaccuucaacuuccugcagugguacguggccgagcagcacgaggaggagguccuguucaaggacauccucgacaagaucgagcugaucgggaacgagaaccacggccuguaccucgcggaccaguacgugaaggggaucgccaagucccgcaagagcuga

SEQ ID NO: 326 - RNA, 1113 nt, Artificial Sequence
  derived and/or modified CDS sequence (opt1) from RVA/DS-1/P[4]__CAD62680.1__P2_VP8*(41-223)_Ferritin
augcaguacaucaaggcgaacagcaaguucaucggcaucaccgagcugggguccggcagcggggcccagacccgcuacgcgcccgugaacuggggcuccugggagaucaacgacagcacgaccgucgagccggugcucgacgggcccuaccagcccaccaccuucaagcccccgaacgacuacuggcugcugaucuccagcaacacgaacggcguggucuacgaguccaccaacaacaacgacuucuggaccgccgugagcuccguggagccccacgucagccagaccaaccggcaguacauccucuucggcgagaacaagcaguucaacguggagaacaacuccgacaaguggaaguucuucgagacguucaccgggagcucccagggcaacuucagcaaccgccggacccugaccuccagcaaccgccugguggggaugcucaaguacggcgggcgggucuggacguuccacggcgagacgccccgcgccaccaccgacuccagcaacaccgccgaccugaacaacaucuccaucaucauccacagcgaguucuacaucaucccccggagccaggaguccaagugcaacgaguacaucaacaacggccugagcgggggcgacaucaucaagcuccugaacgagcaggucaacaaggagaugcaguccagcaaccuguacauguccaugagcuccuggugcuacacccacagccucgacggggccggccuguuccuguucgaccacgcggccgaggaguacgagcacgccaagaagcucaucaucuuccugaacgagaacaacgugccggugcagcugaccuccaucagcgcccccgagcacaaguucgagggccucacccagaucuuccagaaggcguacgagcacgagcagcacaucuccgagagcaucaacaacaucguggaccacgccaucaaguccaaggaccacgccacguucaacuuccugcagugguacguggccgagcagcacgaggaggagguccuguucaaggacauccucgacaagaucgagcugaucgggaacgagaaccacggccuguaccucgccgaccaguacgugaaggggaucgccaagagccgcaaguccuga

SEQ ID NO: 327 - RNA, 1113 nt, Artificial Sequence; identical to SEQ ID NO: 326
  derived and/or modified CDS sequence (opt1) from RVA/DS-1/P[4]__ABV53252.1__P2_VP8*(41-223)_Ferritin

SEQ ID NO: 328 - RNA, 1113 nt, Artificial Sequence
  derived and/or modified CDS sequence (opt1) from RVA/F01322/P[6]__AFA51886.1__P2_VP8*(41-223)_Ferritin
augcaguacaucaaggccaacagcaaguucaucggcaucaccgagcugggguccggcagcggggcccagaccaacuacgcgcccgugacguggucccacggcgaggucaacgacagcaccaccaucgagccggugcucgacgggcccuaccagcccaccaacuucaagcccccgaacgacuacuggauccugcugaaccccacgaaccagcaggucgugcucgagggcaccaacaagaccgacaucuggguggcccugcugcucguggagcccaacgucaccaaccagucccgccaguacacgcuguucggcgagaccaagcagaucaccguggagaacaacaccaacaaguggaaguucuucgagauguuccggagcuccgugagcgccgaguuccagcacaagcgcacgcugaccuccgacaccaagcucgccggguucaugaaguucuacaacagcgucuggaccuuccacggcgagacgcccaacgccaccaccgacuacuccagcaccuccaaccuguucgagguggagacggugauccacgucgaguucuacaucaucccgcggagccaggaguccaagugcagcgaguacaucaacaccgggcuguccggcggggacaucaucaagcuccugaacgagcaggucaacaaggagaugcagagcuccaaccuguacaugagcaugagcuccuggugcuacacccacagccucgacggcgcgggccuguuccuguucgaccacgccgccgaggaguacgagcacgccaagaagcucaucaucuuccugaacgagaacaacgugcccgugcagcugaccuccaucagcgcgcccgagcacaaguucgaggggcucacgcagaucuuccagaaggccuacgagcacgagcagcacaucuccgagagcaucaacaacaucguggaccacgccaucaaguccaaggaccacgccaccuucaacuuccugcagugguacguggccgagcagcacgaggaggagguccuguucaaggacauccucgacaagaucgagcugaucggcaacgagaaccacgggcuguaccucgcggaccaguacgugaagggcaucgccaagagccgcaaguccuga

SEQ ID NO: 329 - RNA, 1113 nt, Artificial Sequence
  derived and/or modified CDS sequence (opt1) from RVA/1076/P[6]__AAA47337.1__P2_VP8*(41-223)_Ferritin
augcaguacaucaaggccaacagcaaguucaucggcaucaccgagcugggguccggcagcggggcccagaccaacuacgcgcccgugacguggucccacggcgaggucaacgacagcaccaccaucgagccggugcucgacgggcccuaccagcccaccuccuucaagcccccgagcgacuacuggauccugcugaaccccacgaaccagcaggucgugcucgagggcaccaacaagaccgacaucuggguggcccugcugcucguggagcccaacgucaccaaccagucccgccaguacacgcuguucggcgagaccaagcagaucaccguggagaacaacaccaacaaguggaaguucuucgagauguuccggagcuccgugagcgccgaguuccagcacaagcgcacgcugaccuccgacaccaagcucgccggguuccugaaguucuacaacagcgucuggaccuucuacggcgagacgccccacgccaccaccgacuacuccagcaccuccaaccugagcgagguggagacggcgauccacguggaguucuacaucaucccgcggucccaggagagcaagugcaacgaguacaucaacaccgggcucuccggcggggacaucaucaagcugcugaacgagcaggucaacaaggagaugcagagcagcaaccucuacauguccaugagcuccuggugcuacacccacagccuggacggcgccggccuguuccucuucgaccacgccgccgaggaguacgagcacgcgaagaagcugaucaucuuccugaacgagaacaacgugcccgugcagcucaccuccaucagcgcccccgagcacaaguucgaggggcugacgcagaucuuccagaaggccuacgagcacgagcagcacaucuccgagagcaucaacaacaucgucgaccacgccaucaaguccaaggaccacgccaccuucaacuuccugcagugguacguggcggagcagcacgaggaggagguccucuucaaggacauccuggacaagaucgagcugaucggcaacgagaaccacgggcucuaccuggccgaccaguacgugaagggcaucgccaagagccgcaaguccuga

SEQ ID NO: 330 - RNA, 1113 nt, Artificial Sequence
  derived and/or modified CDS sequence (opt1) from RVA/BE1128/P[8]__AEX30671.1__P2_VP8*(41-223)_Ferritin
augcaguacaucaaggccaacagcaaguucaucggcaucaccgagcugggguccggcagcggggcccagacccgcuacgcgcccgugaacuggggccacggggagaucaacgacuccacgaccgucgagccgauccucgacggccccuaccagcccaccaccuucacgcccccgaccgacuacuggauccugaucaccagcaacaccaacggcgugguguacgaguccacgaacaacagcgacuucuggaccgccgucaucgccguggagccccacgugaaccccgucgaccggcaguacaacguguucggggagaacaagcaguucaacgugcgcaacgacuccgacaaguggaaguuccuggagauguuccggggcagcucccagaacgacuucuacaaccgccggacccucaccagcgacacgcgccuggucgggauccugaaguacggcgggcggguguggaccuuccacggcgagacgccccgcgccaccaccgacuccagcaacaccgccaaccucgacggcaucuccaucaccauccacagcgaguucuacaucaucccgcggucccaggagagcaagugcaacgaguacaucaacaacgggcuguccggcggggacaucaucaagcugcucaacgagcaggucaacaaggagaugcagagcuccaaccuguacaugagcaugagcuccuggugcuacacccacagccuggacggcgcgggccucuuccuguucgaccacgccgccgaggaguacgagcacgccaagaagcugaucaucuuccucaacgagaacaacgugcccgugcagcugacguccaucagcgcgcccgagcacaaguucgaggggcugacccagaucuuccagaaggccuacgagcacgagcagcacaucuccgagagcaucaacaacaucguggaccacgccaucaaguccaaggaccacgccaccuucaacuuccuccagugguacgucgccgagcagcacgaggaggaggugcuguucaaggacauccuggacaagaucgagcucaucggcaacgagaaccacgggcuguaccuggcggaccaguacgugaagggcaucgccaagagccgcaaguccuga

SEQ ID NO: 331 - RNA, 1113 nt, Artificial Sequence
  derived and/or modified CDS sequence (opt1) from RVA/Wa-VirWa/P[8]__ACR22783.1__P2_VP8*(41-223)_Ferritin
augcaguacaucaaggccaacagcaaguucaucggcaucaccgagcugggguccggcagcggggcccagacccgcuacgcgcccgugaacuggggccacggggagaucaacgacuccacgaccgucgagccgauccucgacggccccuaccagcccaccaccuucacgcccccgaacgacuacuggauccugaucaacagcaacaccaacggcgugguguacgaguccaccaacaacagcgacuucuggaccgccgucguggccaucgagccccacgugaaccccgucgaccggcaguacacgaucuucggggaguccaagcaguucaacgugcgcaacgacagcaacaaguggaaguuccuggagauguuccgguccagcucccagaacgaguucuacaaccgccggacccucaccagcgacacccgccuggugggcauccugaaguacgggggccgggucuggacguuccacggggagacgccccgcgccaccaccgacuccagcuccaccgccaaccucaacaacaucagcaucaccauccacuccgaguucuacaucaucccgcggagccaggaguccaagugcaacgaguacaucaacaacggccugagcggcggggacaucaucaagcugcucaacgagcaggucaacaaggagaugcagagcuccaaccuguacaugagcauguccagcuggugcuacacccacucccuggacggcgcgggccucuuccuguucgaccacgccgccgaggaguacgagcacgccaagaagcugaucaucuuccucaacgagaacaacgugcccgugcagcugaccagcaucuccgcgcccgagcacaaguucgaggggcugacgcagaucuuccagaaggccuacgagcacgagcagcacaucagcgaguccaucaacaacaucguggaccacgccaucaagagcaaggaccacgccaccuucaacuuccuccagugguacguggccgagcagcacgaggaggagguccuguucaaggacauccuggacaagaucgagcucaucggcaacgagaaccacgggcuguaccuggcggaccaguacgugaagggcaucgccaagucccgcaagagcuga

SEQ ID NO: 332 - RNA, 1113 nt, Artificial Sequence
  derived and/or modified CDS sequence (opt1) from RVA/Wa/P[8]__AAA47290.1__P2_VP8*(41-223)_Ferritin
augcaguacaucaaggccaacagcaaguucaucggcaucaccgagcugggguccggcagcggggcccagacccgcuacgcgcccgugaacuggggccacggggagaucaacgacuccacgaccgucgagccgauccucgacggccccuaccagcccaccaccuucacgcccccgaacgacuacuggauccugaucaacagcaacaccaacggcgugguguacgaguccaccaacaacagcgacuucuggaccgccgucguggccaucgagccccacgugaaccccgucgaccggcaguacacgaucuucggggaguccaagcaguucaacgugagcaacgacuccaacaaguggaaguuccuggagauguuccgcagcuccagccagaacgaguucuacaaccggcgcacccucaccuccgacacccgguucgugggcauccugaaguacgggggccgcgucuggacguuccacggggagacgccccgggccaccaccgacagcuccagcaccgccaaccugaacaacaucuccaucaccauccacagcgaguucuacaucaucccgcgcucccaggagagcaagugcaacgaguacaucaacaacggccucagcggcggggacaucaucaagcugcugaacgagcaggucaacaaggagaugcaguccagcaaccucuacauguccaugagcuccuggugcuacacccacagccuggacggcgcggggcuguuccucuucgaccacgccgccgaggaguacgagcacgccaagaagcugaucaucuuccugaacgagaacaacgugcccgugcagcucaccuccaucagcgcgcccgagcacaaguucgagggccugacgcagaucuuccagaaggccuacgagcacgagcagcacaucuccgagagcaucaacaacaucguggaccacgccaucaaguccaaggaccacgccaccuucaacuuccugcagugguacguggccgagcagcacgaggaggagguccucuucaaggacauccuggacaagaucgagcugaucggcaacgagaaccacgggcucuaccuggcggaccaguacgugaagggcaucgccaagagccggaaguccuga

SEQ ID NO: 333 - RNA, 1113 nt, Artificial Sequence
  derived and/or modified CDS sequence (opt1) from RVA/Wa/P[8]__AAA66953.1__P2_VP8*(41-223)_Ferritin
augcaguacaucaaggccaacagcaaguucaucggcaucaccgagcugggguccggcagcggggcccagacccgcuacgcgcccgugaacuggggccacggggagaucaacgacuccacgaccgucgagccgaugcucgacggccccuaccagcccaccaccuucacgcccccgaacgacuacuggauccugaucaacagcaacaccaacggcgugguguacgaguccaccaacaacagcgacuucuggaccgccgucguggccaucgagccccacgugaaccccgucgaccggcaguacacgaucuucggggaguccaagcaguucaacgugagcaacgacuccaacaaguggaaguuccuggagauguuccgcagcuccagccagaacgaguucuacaaccggcgcacccucaccuccgacacccgguucgugggcauccugaaguacgggggccgcgucuggacguuccacggggagacgccccgggccaccaccgacagcuccagcaccgccaaccugaacaacaucuccaucaccauccacagcgaguucuacaucaucccgcgcucccaggagagcaagugcaacgaguacaucaacaacggccucagcggcggggacaucaucaagcugcugaacgagcaggucaacaaggagaugcaguccagcaaccucuacauguccaugagcuccuggugcuacacccacagccuggacggcgcggggcuguuccucuucgaccacgccgccgaggaguacgagcacgccaagaagcugaucaucuuccugaacgagaacaacgugcccgugcagcucaccuccaucagcgcgcccgagcacaaguucgagggccugacgcagaucuuccagaaggccuacgagcacgagcagcacaucuccgagagcaucaacaacaucguggaccacgccaucaaguccaaggaccacgccaccuucaacuuccugcagugguacguggccgagcagcacgaggaggagguccucuucaaggacauccuggacaagaucgagcugaucggcaacgagaaccacgggcucuaccuggcggaccaguacgugaagggcaucgccaagagccggaaguccuga

SEQ ID NO: 334 - RNA, 1047 nt, Artificial Sequence
  derived and/or modified CDS sequence (opt1) from RVA/BE1058/P[4]__AEX30665.1__LumSynt_P2_VP8*(65-223)
augcagaucuacgagggcaagcugaccgccgaggggcuccgcuucggcaucguggccagccgguucaaccacgcgcuggucgaccgccugguggagggggccaucgacgccaucgugcggcacggcgggcgcgaggaggacaucacccucguccgggugcccggcuccugggagaucccgguggccgccggcgagcuggcgcgcaaggaggacaucgacgccgucaucgccaucggggugcugauccggggcgccacgccccacuucgacuacaucgcgagcgagguguccaaggggcucgccgaccugagccuggagcuccgcaagcccaucaccuucggcgucaucaccgccgacacccuggagcaggccaucgagcgggccgggacgaagcacggcaacaagggcugggaggcggcccuguccgccaucgagauggccaaccucuucaagagccugcgcgggggcuccgggggcagcggcggguccggcgggagcggcgggggccaguacaucaaggccaacuccaaguucaucggcaucaccgagcuggggagcggcuccgggcucgacggccccuaccagccgaccaccuucaagccgcccaacgacuacuggcugcugaucagcuccaacacggacggggugguguacgagagcaccaacaacuccgacuucuggaccgcggucaucgccguggagccccacgugaaccagaccaaccggcaguacguccucuucggcgagaacaagcaguucaacaucgagaacagcuccgacaaguggaaguucuucgagauguucaagggcaacagccagagcgacuucuccaaccgccggacgcugaccagcuccaaccgccugguggggaugcucaaguacggcgggcggguguggaccuuccacggcgagacgccccgcgccaccaccgacagcuccagcaccgccgaccugaacaacaucuccaucaucauccacagcgaguucuacaucaucccccggucccaggagagcaagugcaacgaguacaucaacaacgggcuguga

SEQ ID NO: 335 - RNA, 1047 nt, Artificial Sequence
  derived and/or modified CDS sequence (opt1) from RVA/DS-1/P[4]__CAD62680.1__LumSynt_P2_VP8*(65-223)
augcagaucuacgagggcaagcugaccgccgaggggcuccgcuucggcaucguggccagccgguucaaccacgcgcuggucgaccgccugguggagggggccaucgacgccaucgugcggcacggcgggcgcgaggaggacaucacccucguccgggugcccggcuccugggagaucccgguggccgccggcgagcuggcgcgcaaggaggacaucgacgccgucaucgccaucggggugcugauccggggcgccacgccccacuucgacuacaucgcgagcgagguguccaaggggcucgccgaccugagccuggagcuccgcaagcccaucaccuucggcgucaucaccgccgacacccuggagcaggccaucgagcgggccgggacgaagcacggcaacaagggcugggaggcggcccuguccgccaucgagauggccaaccucuucaagagccugcgcgggggcuccgggggcagcggcggguccggcgggagcggcgggggccaguacaucaaggccaacuccaaguucaucggcaucaccgagcuggggagcggcuccgggcucgacggccccuaccagccgaccaccuucaagccgcccaacgacuacuggcugcugaucagcuccaacacgaacggggugguguacgagagcaccaacaacaacgacuucuggaccgcggucuccagcguggagccccacgugucccagaccaaccggcaguacauccucuucggcgagaacaagcaguucaacgucgagaacaacagcgacaaguggaaguucuucgagacguucaccggcagcucccaggggaacuucagcaaccgccggacccugaccuccagcaaccgccuggugggcaugcucaaguacgggggccggguguggacguuccacggggagacgccccgcgccaccaccgacuccagcaacaccgccgaccugaacaacaucuccaucaucauccacagcgaguucuacaucaucccccggucccaggagagcaagugcaacgaguacaucaacaacggccuguga

SEQ ID NO: 336 - RNA, 1047 nt, Artificial Sequence; identical to SEQ ID NO: 335
  derived and/or modified CDS sequence (opt1) from RVA/DS-1/P[4]__ABV53252.1__LumSynt_P2_VP8*(65-223)

SEQ ID NO: 337 - RNA, 1047 nt, Artificial Sequence
  derived and/or modified CDS sequence (opt1) from RVA/F01322/P[6]__AFA51886.1__LumSynt_P2_VP8*(65-223)
augcagaucuacgagggcaagcugaccgccgaggggcuccgcuucggcaucguggccagccgguucaaccacgcgcuggucgaccgccugguggagggggccaucgacgccaucgugcggcacggcgggcgcgaggaggacaucacccucguccgggugcccggcuccugggagaucccgguggccgccggcgagcuggcgcgcaaggaggacaucgacgccgucaucgccaucggggugcugauccggggcgccacgccccacuucgacuacaucgcgagcgagguguccaaggggcucgccgaccugagccuggagcuccgcaagcccaucaccuucggcgucaucaccgccgacacccuggagcaggccaucgagcgggccgggacgaagcacggcaacaagggcugggaggcggcccuguccgccaucgagauggccaaccucuucaagagccugcgcgggggcuccgggggcagcggcggguccggcgggagcggcgggggccaguacaucaaggccaacuccaaguucaucggcaucaccgagcuggggagcggcuccgggcucgacggccccuaccagccgaccaacuucaagccgcccaacgacuacuggauccugcugaaccccaccaaccagcaggucgugcucgaggggacgaacaagaccgacaucuggguggcgcugcugcucguggagcccaacgugaccaaccagagccggcaguacacccuguucggcgagacgaagcagaucaccgucgagaacaacaccaacaaguggaaguucuucgagauguuccgcuccagcguguccgccgaguuccagcacaagcggacccugacgagcgacaccaagcucgccggcuucaugaaguucuacaacuccguguggaccuuccacggggagacccccaacgccacgaccgacuacagcagcaccuccaaccuguucgaggucgagaccgugauccacguggaguucuacaucaucccccgcagccaggaguccaagugcagcgaguacaucaacacgggccuguga

SEQ ID NO: 338 - RNA, 1047 nt, Artificial Sequence
  derived and/or modified CDS sequence (opt1) from RVA/1076/P[6]__AAA47337.1__LumSynt_P2_VP8*(65-223)
augcagaucuacgagggcaagcugaccgccgaggggcuccgcuucggcaucguggccagccgguucaaccacgcgcuggucgaccgccugguggagggggccaucgacgccaucgugcggcacggcgggcgcgaggaggacaucacccucguccgggugcccggcuccugggagaucccgguggccgccggcgagcuggcgcgcaaggaggacaucgacgccgucaucgccaucggggugcugauccggggcgccacgccccacuucgacuacaucgcgagcgagguguccaaggggcucgccgaccugagccuggagcuccgcaagcccaucaccuucggcgucaucaccgccgacacccuggagcaggccaucgagcgggccgggacgaagcacggcaacaagggcugggaggcggcccuguccgccaucgagauggccaaccucuucaagagccugcgcgggggcuccgggggcagcggcggguccggcgggagcggcgggggccaguacaucaaggccaacuccaaguucaucggcaucaccgagcuggggagcggcuccgggcucgacggccccuaccagccgaccagcuucaagccgcccuccgacuacuggauccugcugaaccccaccaaccagcaggucgugcucgaggggacgaacaagaccgacaucuggguggcgcugcugcucguggagcccaacgugaccaaccagagccggcaguacacccuguucggcgagacgaagcagaucaccgucgagaacaacaccaacaaguggaaguucuucgagauguuccgcuccagcguguccgccgaguuccagcacaagcggacccugacgagcgacaccaagcucgccggcuuccugaaguucuacaacagcguguggaccuucuacggggagacgccccacgccaccaccgacuacuccagcaccuccaaccugagcgaggucgagaccgccauccacguggaguucuacaucaucccccgcucccaggagagcaagugcaacgaguacaucaacacgggccucuga

SEQ ID NO: 339 - RNA, 1047 nt, Artificial Sequence
  derived and/or modified CDS sequence (opt1) from RVA/BE1128/P[8]__AEX30671.1__LumSynt_P2_VP8*(65-223)
augcagaucuacgagggcaagcugaccgccgaggggcuccgcuucggcaucguggccagccgguucaaccacgcgcuggucgaccgccugguggagggggccaucgacgccaucgugcggcacggcgggcgcgaggaggacaucacccucguccgggugcccggcuccugggagaucccgguggccgccggcgagcuggcgcgcaaggaggacaucgacgccgucaucgccaucggggugcugauccggggcgccacgccccacuucgacuacaucgcgagcgagguguccaaggggcucgccgaccugagccuggagcuccgcaagcccaucaccuucggcgucaucaccgccgacacccuggagcaggccaucgagcgggccgggacgaagcacggcaacaagggcugggaggcggcccuguccgccaucgagauggccaaccucuucaagagccugcgcgggggcuccgggggcagcggcggguccggcgggagcggcgggggccaguacaucaaggccaacuccaaguucaucggcaucaccgagcuggggagcggcuccgggcucgacggccccuaccagccgaccaccuucacgccgcccaccgacuacuggauccugaucaccagcaacaccaacggggugguguacgaguccacgaacaacagcgacuucuggaccgcggucaucgccguggagccccacgugaaccccgucgaccggcaguacaacguguucggcgagaacaagcaguucaacgugcgcaacgacuccgacaaguggaaguuccuggagauguuccggggcagcucccagaacgacuucuacaaccgccggacccucaccagcgacacgcgccuggucgggauccugaaguacggcgggcggguguggaccuuccacggcgagacgccccgcgccaccaccgacagcuccaacaccgccaaccucgacgggaucagcaucaccauccacuccgaguucuacaucaucccccggagccaggaguccaagugcaacgaguacaucaacaacggccuguga

SEQ ID NO: 340 - RNA, 1047 nt, Artificial Sequence
  derived and/or modified CDS sequence (opt1) from RVA/Wa-VirWa/P[8]__ACR22783.1__LumSynt_P2_VP8*(65-223)
augcagaucuacgagggcaagcugaccgccgaggggcuccgcuucggcaucguggccagccgguucaaccacgcgcuggucgaccgccugguggagggggccaucgacgccaucgugcggcacggcgggcgcgaggaggacaucacccucguccgggugcccggcuccugggagaucccgguggccgccggcgagcuggcgcgcaaggaggacaucgacgccgucaucgccaucggggugcugauccggggcgccacgccccacuucgacuacaucgcgagcgagguguccaaggggcucgccgaccugagccuggagcuccgcaagcccaucaccuucggcgucaucaccgccgacacccuggagcaggccaucgagcgggccgggacgaagcacggcaacaagggcugggaggcggcccuguccgccaucgagauggccaaccucuucaagagccugcgcgggggcuccgggggcagcggcggguccggcgggagcggcgggggccaguacaucaaggccaacuccaaguucaucggcaucaccgagcuggggagcggcuccgggcucgacggccccuaccagccgaccaccuucacgccgcccaacgacuacuggauccugaucaacagcaacaccaacggggugguguacgaguccaccaacaacagcgacuucuggaccgcggucguggccaucgagccccacgugaaccccgucgaccggcaguacacgaucuucggcgaguccaagcaguucaacgugcgcaacgacagcaacaaguggaaguuccuggagauguuccgguccagcagccagaacgaguucuacaaccgccggacccucaccuccgacacccgccuggugggcauccugaaguacgggggccgggucuggacguuccacggggagacgccccgcgccaccaccgacagcuccagcaccgccaaccucaacaacaucuccaucaccauccacagcgaguucuacaucaucccccggucccaggagagcaagugcaacgaguacaucaacaacggccuguga

SEQ ID NO: 341 - RNA, 1047 nt, Artificial Sequence
  derived and/or modified CDS sequence (opt1) from RVA/Wa/P[8]__AAA47290.1__LumSynt_P2_VP8*(65-223)
augcagaucuacgagggcaagcugaccgccgaggggcuccgcuucggcaucguggccagccgguucaaccacgcgcuggucgaccgccugguggagggggccaucgacgccaucgugcggcacggcgggcgcgaggaggacaucacccucguccgggugcccggcuccugggagaucccgguggccgccggcgagcuggcgcgcaaggaggacaucgacgccgucaucgccaucggggugcugauccggggcgccacgccccacuucgacuacaucgcgagcgagguguccaaggggcucgccgaccugagccuggagcuccgcaagcccaucaccuucggcgucaucaccgccgacacccuggagcaggccaucgagcgggccgggacgaagcacggcaacaagggcugggaggcggcccuguccgccaucgagauggccaaccucuucaagagccugcgcgggggcuccgggggcagcggcggguccggcgggagcggcgggggccaguacaucaaggccaacuccaaguucaucggcaucaccgagcuggggagcggcuccgggcucgacggccccuaccagccgaccaccuucacgccgcccaacgacuacuggauccugaucaacagcaacaccaacggggugguguacgaguccaccaacaacagcgacuucuggaccgcggucguggccaucgagccccacgugaaccccgucgaccggcaguacacgaucuucggcgaguccaagcaguucaacgugagcaacgacuccaacaaguggaaguuccuggagauguuccgcagcagcucccagaacgaguucuacaaccggcgcacccucaccagcgacacccgguucgugggcauccugaaguacgggggccgcgucuggacguuccacggggagacgccccgggccaccaccgacuccagcuccaccgccaaccugaacaacaucagcaucaccauccacuccgaguucuacaucaucccccgcagccaggaguccaagugcaacgaguacaucaacaacggccucuga

SEQ ID NO: 342 - RNA, 1047 nt, Artificial Sequence; identical to SEQ ID NO: 341
  derived and/or modified CDS sequence (opt1) from RVA/Wa/P[8]__AAA66953.1__LumSynt_P2_VP8*(65-223)

SEQ ID NO: 343 - RNA, 1119 nt, Artificial Sequence
  derived and/or modified CDS sequence (opt1) from RVA/BE1058/P[4]__AEX30665.1__LumSynt_P2_VP8*(41-223)
augcagaucuacgagggcaagcugaccgccgaggggcuccgcuucggcaucguggccagccgguucaaccacgcgcuggucgaccgccugguggagggggccaucgacgccaucgugcggcacggcgggcgcgaggaggacaucacccucguccgggugcccggcuccugggagaucccgguggccgccggcgagcuggcgcgcaaggaggacaucgacgccgucaucgccaucggggugcugauccggggcgccacgccccacuucgacuacaucgcgagcgagguguccaaggggcucgccgaccugagccuggagcuccgcaagcccaucaccuucggcgucaucaccgccgacacccuggagcaggccaucgagcgggccgggacgaagcacggcaacaagggcugggaggcggcccuguccgccaucgagauggccaaccucuucaagagccugcgcgggggcuccgggggcagcggcggguccggcgggagcggcgggggccaguacaucaaggccaacuccaaguucaucggcaucaccgagcuggggagcggcuccggggcgcagacccgguacgcccccgugaacuggggccacggggagaucaacgacagcaccacgguggagccgguccucgacggccccuaccagcccaccaccuucaagcccccgaacgacuacuggcugcugaucuccagcaacaccgacggcgugguguacgaguccacgaacaacagcgacuucuggaccgccgucaucgccguggagccccacgugaaccagaccaaccgccaguacguccucuucggggagaacaagcaguucaacaucgagaacuccagcgacaaguggaaguucuucgagauguucaagggcaacagccaguccgacuucagcaaccggcgcacccugacguccagcaaccggcugguggggaugcucaaguacggcgggcgcguguggaccuuccacggcgagacgccccgggccaccaccgacuccagcuccaccgcggaccugaacaacaucagcaucaucauccacuccgaguucuacaucaucccccgcagccaggaguccaagugcaacgaguacaucaacaacggccuguga

SEQ ID NO: 344 - RNA, 1119 nt, Artificial Sequence
  derived and/or modified CDS sequence (opt1) from RVA/DS-1/P[4]__CAD62680.1__LumSynt_P2_VP8*(41-223)
augcagaucuacgagggcaagcugaccgccgaggggcuccgcuucggcaucguggccagccgguucaaccacgcgcuggucgaccgccugguggagggggccaucgacgccaucgugcggcacggcgggcgcgaggaggacaucacccucguccgggugcccggcuccugggagaucccgguggccgccggcgagcuggcgcgcaaggaggacaucgacgccgucaucgccaucggggugcugauccggggcgccacgccccacuucgacuacaucgcgagcgagguguccaaggggcucgccgaccugagccuggagcuccgcaagcccaucaccuucggcgucaucaccgccgacacccuggagcaggccaucgagcgggccgggacgaagcacggcaacaagggcugggaggcggcccuguccgccaucgagauggccaaccucuucaagagccugcgcgggggcuccgggggcagcggcggguccggcgggagcggcgggggccaguacaucaaggccaacuccaaguucaucggcaucaccgagcuggggagcggcuccggggcgcagacccgguacgcccccgugaacuggggcagcugggagaucaacgacuccaccacgguggagccgguccucgacgggcccuaccagcccaccaccuucaagcccccgaacgacuacuggcugcugaucagcuccaacaccaacggcgugguguacgagagcacgaacaacaacgacuucuggaccgccgucuccagcguggagccccacgugagccagaccaaccgccaguacauccucuucggcgagaacaagcaguucaacgucgagaacaacuccgacaaguggaaguucuucgagaccuucacggggagcucccagggcaacuucagcaaccggcgcacccugaccuccagcaaccggcugguggggaugcucaaguacggcgggcgcguguggaccuuccacggcgagacgccccgggccaccaccgacuccagcaacaccgccgaccugaacaacaucuccaucaucauccacagcgaguucuacaucaucccccgcucccaggagagcaagugcaacgaguacaucaacaacggccuguga

SEQ ID NO: 345 - RNA, 1119 nt, Artificial Sequence; identical to SEQ ID NO: 344
  derived and/or modified CDS sequence (opt1) from RVA/DS-1/P[4]__ABV53252.1__LumSynt_P2_VP8*(41-223)

SEQ ID NO: 346 - RNA, 1119 nt, Artificial Sequence
  derived and/or modified CDS sequence (opt1) from RVA/F01322/P[6]__AFA51886.1__LumSynt_P2_VP8*(41-223)
augcagaucuacgagggcaagcugaccgccgaggggcuccgcuucggcaucguggccagccgguucaaccacgcgcuggucgaccgccugguggagggggccaucgacgccaucgugcggcacggcgggcgcgaggaggacaucacccucguccgggugcccggcuccugggagaucccgguggccgccggcgagcuggcgcgcaaggaggacaucgacgccgucaucgccaucggggugcugauccggggcgccacgccccacuucgacuacaucgcgagcgagguguccaaggggcucgccgaccugagccuggagcuccgcaagcccaucaccuucggcgucaucaccgccgacacccuggagcaggccaucgagcgggccgggacgaagcacggcaacaagggcugggaggcggcccuguccgccaucgagauggccaaccucuucaagagccugcgcgggggcuccgggggcagcggcggguccggcgggagcggcgggggccaguacaucaaggccaacuccaaguucaucggcaucaccgagcuggggagcggcuccggggcgcagaccaacuacgcccccgugaccuggagccacggcgaggugaacgacuccacgaccaucgagccgguccucgacgggcccuaccagcccaccaacuucaagcccccgaacgacuacuggauccugcugaaccccaccaaccagcaggucgugcucgagggcacgaacaagaccgacaucuggguggcccugcugcucguggagcccaacgugaccaaccagagccggcaguacacccuguucggcgagacgaagcagaucaccgucgagaacaacaccaacaaguggaaguucuucgagauguuccgcuccagcguguccgccgaguuccagcacaagcggacccugacgagcgacaccaagcucgccggguucaugaaguucuacaacagcguguggaccuuccacggcgagacccccaacgcgacgaccgacuacuccagcaccuccaaccuguucgaggucgagaccgugauccacguggaguucuacaucaucccgcgcagccaggaguccaagugcagcgaguacaucaacacggggcuguga

SEQ ID NO: 347 - RNA, 1119 nt, Artificial Sequence
  derived and/or modified CDS sequence (opt1) from RVA/1076/P[6]__AAA47337.1__LumSynt_P2_VP8*(41-223)
augcagaucuacgagggcaagcugaccgccgaggggcuccgcuucggcaucguggccagccgguucaaccacgcgcuggucgaccgccugguggagggggccaucgacgccaucgugcggcacggcgggcgcgaggaggacaucacccucguccgggugcccggcuccugggagaucccgguggccgccggcgagcuggcgcgcaaggaggacaucgacgccgucaucgccaucggggugcugauccggggcgccacgccccacuucgacuacaucgcgagcgagguguccaaggggcucgccgaccugagccuggagcuccgcaagcccaucaccuucggcgucaucaccgccgacacccuggagcaggccaucgagcgggccgggacgaagcacggcaacaagggcugggaggcggcccuguccgccaucgagauggccaaccucuucaagagccugcgcgggggcuccgggggcagcggcggguccggcgggagcggcgggggccaguacaucaaggccaacuccaaguucaucggcaucaccgagcuggggagcggcuccggggcgcagaccaacuacgcccccgugaccuggagccacggcgaggugaacgacuccacgaccaucgagccgguccucgacgggcccuaccagcccaccagcuucaagcccccguccgacuacuggauccugcugaaccccaccaaccagcaggucgugcucgagggcacgaacaagaccgacaucuggguggcccugcugcucguggagcccaacgugaccaaccagagccggcaguacacccuguucggcgagacgaagcagaucaccgucgagaacaacaccaacaaguggaaguucuucgagauguuccgcuccagcgugagcgccgaguuccagcacaagcggacccugacguccgacaccaagcucgccggguuccugaaguucuacaacagcguguggaccuucuacggcgagacgccccacgcgaccaccgacuacuccagcaccuccaaccugagcgaggucgagaccgccauccacguggaguucuacaucaucccgcgcucccaggagagcaagugcaacgaguacaucaacacggggcucuga

SEQ ID NO: 348 - RNA, 1119 nt, Artificial Sequence
  derived and/or modified CDS sequence (opt1) from RVA/BE1128/P[8]__AEX30671.1__LumSynt_P2_VP8*(41-223)
augcagaucuacgagggcaagcugaccgccgaggggcuccgcuucggcaucguggccagccgguucaaccacgcgcuggucgaccgccugguggagggggccaucgacgccaucgugcggcacggcgggcgcgaggaggacaucacccucguccgggugcccggcuccugggagaucccgguggccgccggcgagcuggcgcgcaaggaggacaucgacgccgucaucgccaucggggugcugauccggggcgccacgccccacuucgacuacaucgcgagcgagguguccaaggggcucgccgaccugagccuggagcuccgcaagcccaucaccuucggcgucaucaccgccgacacccuggagcaggccaucgagcgggccgggacgaagcacggcaacaagggcugggaggcggcccuguccgccaucgagauggccaaccucuucaagagccugcgcgggggcuccgggggcagcggcggguccggcgggagcggcgggggccaguacaucaaggccaacuccaaguucaucggcaucaccgagcuggggagcggcuccggggcgcagacccgguacgcccccgugaacuggggccacggggagaucaacgacagcaccacgguggagccgauccucgacggccccuaccagcccaccaccuucacgcccccgaccgacuacuggauccugaucaccuccaacaccaacggcgucguguacgagagcaccaacaacuccgacuucuggacggccgugaucgccgucgagccccacgugaaccccguggaccgccaguacaacgucuucggggagaacaagcaguucaacgugcggaacgacagcgacaaguggaaguuccuggagauguuccgcggcuccagccagaacgacuucuacaaccggcgcacccucaccagcgacacccggcugguggggauccugaaguacggcgggcgcgucuggacguuccacggcgagacgccccgggccaccaccgacuccagcaacaccgcgaaccucgacggcaucuccaucaccauccacagcgaguucuacaucaucccgcgcucccaggagagcaagugcaacgaguacaucaacaacgggcuguga

SEQ ID NO: 349 - RNA, 1119 nt, Artificial Sequence
  derived and/or modified CDS sequence (opt1) from RVA/Wa-VirWa/P[8]__ACR22783.1__LumSynt_P2_VP8*(41-223)
augcagaucuacgagggcaagcugaccgccgaggggcuccgcuucggcaucguggccagccgguucaaccacgcgcuggucgaccgccugguggagggggccaucgacgccaucgugcggcacggcgggcgcgaggaggacaucacccucguccgggugcccggcuccugggagaucccgguggccgccggcgagcuggcgcgcaaggaggacaucgacgccgucaucgccaucggggugcugauccggggcgccacgccccacuucgacuacaucgcgagcgagguguccaaggggcucgccgaccugagccuggagcuccgcaagcccaucaccuucggcgucaucaccgccgacacccuggagcaggccaucgagcgggccgggacgaagcacggcaacaagggcugggaggcggcccuguccgccaucgagauggccaaccucuucaagagccugcgcgggggcuccgggggcagcggcggguccggcgggagcggcgggggccaguacaucaaggccaacuccaaguucaucggcaucaccgagcuggggagcggcuccggggcgcagacccgguacgcccccgugaacuggggccacggggagaucaacgacagcaccacgguggagccgauccucgacggccccuaccagcccaccaccuucacgcccccgaacgacuacuggauccugaucaacuccaacaccaacggcgucguguacgagagcaccaacaacuccgacuucuggaccgccguggucgccaucgagccccacgugaaccccguggaccgccaguacaccaucuucggggagagcaagcaguucaacguccggaacgacuccaacaaguggaaguuccuggagauguuccgcagcagcucccagaacgaguucuacaaccggcgcacgcucaccagcgacacccggcuggugggcauccugaaguacgggggccgcguguggaccuuccacggggagacgccccgggccaccaccgacuccagcuccaccgcgaaccucaacaacaucagcaucacgauccacuccgaguucuacaucaucccgcgcagccaggaguccaagugcaacgaguacaucaacaacggccuguga

SEQ ID NO: 350 - RNA, 1119 nt, Artificial Sequence
  derived and/or modified CDS sequence (opt1) from RVA/Wa/P[8]__AAA47290.1__LumSynt_P2_VP8*(41-223)
augcagaucuacgagggcaagcugaccgccgaggggcuccgcuucggcaucguggccagccgguucaaccacgcgcuggucgaccgccugguggagggggccaucgacgccaucgugcggcacggcgggcgcgaggaggacaucacccucguccgggugcccggcuccugggagaucccgguggccgccggcgagcuggcgcgcaaggaggacaucgacgccgucaucgccaucggggugcugauccggggcgccacgccccacuucgacuacaucgcgagcgagguguccaaggggcucgccgaccugagccuggagcuccgcaagcccaucaccuucggcgucaucaccgccgacacccuggagcaggccaucgagcgggccgggacgaagcacggcaacaagggcugggaggcggcccuguccgccaucgagauggccaaccucuucaagagccugcgcgggggcuccgggggcagcggcggguccggcgggagcggcgggggccaguacaucaaggccaacuccaaguucaucggcaucaccgagcuggggagcggcuccggggcgcagacccgguacgcccccgugaacuggggccacggggagaucaacgacagcaccacgguggagccgauccucgacggccccuaccagcccaccaccuucacgcccccgaacgacuacuggauccugaucaacuccaacaccaacggcgucguguacgagagcaccaacaacuccgacuucuggaccgccguggucgccaucgagccccacgugaaccccguggaccgccaguacaccaucuucggggagagcaagcaguucaacgucuccaacgacagcaacaaguggaaguuccuggagauguuccggagcuccagccagaacgaguucuacaaccgccggacgcucaccuccgacacccgcuucgugggcauccugaaguacgggggccggguguggaccuuccacggggagacgccccgcgccaccaccgacagcuccagcaccgcgaaccugaacaacaucuccaucacgauccacagcgaguucuacaucaucccgcggucccaggagagcaagugcaacgaguacaucaacaacggccucuga

SEQ ID NO: 351 - RNA, 1119 nt, Artificial Sequence
  derived and/or modified CDS sequence (opt1) from RVA/Wa/P[8]__AAA66953.1__LumSynt_P2_VP8*(41-223)
augcagaucuacgagggcaagcugaccgccgaggggcuccgcuucggcaucguggccagccgguucaaccacgcgcuggucgaccgccugguggagggggccaucgacgccaucgugcggcacggcgggcgcgaggaggacaucacccucguccgggugcccggcuccugggagaucccgguggccgccggcgagcuggcgcgcaaggaggacaucgacgccgucaucgccaucggggugcugauccggggcgccacgccccacuucgacuacaucgcgagcgagguguccaaggggcucgccgaccugagccuggagcuccgcaagcccaucaccuucggcgucaucaccgccgacacccuggagcaggccaucgagcgggccgggacgaagcacggcaacaagggcugggaggcggcccuguccgccaucgagauggccaaccucuucaagagccugcgcgggggcuccgggggcagcggcggguccggcgggagcggcgggggccaguacaucaaggccaacuccaaguucaucggcaucaccgagcuggggagcggcuccggggcgcagacccgguacgcccccgugaacuggggccacggggagaucaacgacagcaccacgguggagccgaugcucgacggccccuaccagcccaccaccuucacgcccccgaacgacuacuggauccugaucaacuccaacaccaacggcgucguguacgagagcaccaacaacuccgacuucuggaccgccguggucgccaucgagccccacgugaaccccguggaccgccaguacaccaucuucggggagagcaagcaguucaacgucuccaacgacagcaacaaguggaaguuccuggagauguuccggagcuccagccagaacgaguucuacaaccgccggacgcucaccuccgacacccgcuucgugggcauccugaaguacgggggccggguguggaccuuccacggggagacgccccgcgccaccaccgacagcuccagcaccgcgaaccugaacaacaucuccaucacgauccacagcgaguucuacaucaucccgcggucccaggagagcaagugcaacgaguacaucaacaacggccucuga

SEQ ID NO: 352 - RNA, 594 nt, Artificial Sequence
  derived and/or modified CDS sequence (opt1) from RVA/BE1058/P[4]__AEX30665.1__SP-IgE_P2_VP8*(65-223)
auggacuggaccuggauccuguuccucguggccgccgcgacccgcguccacagccaguacaucaaggccaacuccaaguucaucggcaucacggagcuggggagcggcuccgggcuggacggccccuaccagccgaccaccuucaagccgcccaacgacuacuggcuccugaucagcuccaacaccgacggggugguguacgagagcacgaacaacuccgacuucuggaccgccgucaucgccguggagccccacgugaaccagaccaaccggcaguacguccuguucggcgagaacaagcaguucaacaucgagaacagcuccgacaaguggaaguucuucgagauguucaagggcaacagccaguccgacuucagcaaccgccggacccucacguccagcaaccgccugguggggaugcugaaguacggcgggcggguguggaccuuccacggcgagacgccccgcgccaccaccgacuccagcuccaccgcggaccucaacaacaucagcaucaucauccacuccgaguucuacaucaucccccggagccaggagagcaagugcaacgaguacaucaacaacgggcuguga

SEQ ID NO: 353 - RNA, 594 nt, Artificial Sequence
  derived and/or modified CDS sequence (opt1) from RVA/DS-1/P[4]__CAD62680.1__SP-IgE_P2_VP8*(65-223)
auggacuggaccuggauccuguuccucguggccgccgcgacccgcguccacagccaguacaucaaggccaacuccaaguucaucggcaucacggagcuggggagcggcuccgggcuggacggccccuaccagccgaccaccuucaagccgcccaacgacuacuggcuccugaucagcuccaacaccaacggggugguguacgagagcacgaacaacaacgacuucuggaccgccgucuccagcguggagccccacgugucccagaccaaccggcaguacauccuguucggcgagaacaagcaguucaacgucgagaacaacagcgacaaguggaaguucuucgagaccuucacgggcuccagccaggggaacuucuccaaccgccggacccucaccagcuccaaccgccuggugggcaugcugaaguacgggggccggguguggaccuuccacggggagacgccccgcgccaccaccgacagcuccaacaccgccgaccucaacaacaucagcaucaucauccacuccgaguucuacaucaucccccggagccaggagagcaagugcaacgaguacaucaacaacggccuguga

SEQ ID NO: 354 - RNA, 594 nt, Artificial Sequence; identical to SEQ ID NO: 353
  derived and/or modified CDS sequence (opt1) from RVA/DS-1/P[4]__ABV53252.1__SP-IgE_P2_VP8*(65-223)

SEQ ID NO: 355 - RNA, 594 nt, Artificial Sequence
  derived and/or modified CDS sequence (opt1) from RVA/F01322/P[6]__AFA51886.1__SP-IgE_P2_VP8*(65-223)
auggacuggaccuggauccuguuccucguggccgccgcgacccgcguccacagccaguacaucaaggccaacuccaaguucaucggcaucacggagcuggggagcggcuccgggcuggacggccccuaccagccgaccaacuucaagccgcccaacgacuacuggauccuccugaaccccaccaaccagcaggucgugcuggaggggaccaacaagacggacaucuggguggcccuccugcugguggagcccaacgugaccaaccagagccggcaguacacccucuucggcgagaccaagcagaucacggucgagaacaacaccaacaaguggaaguucuucgagauguuccgcuccagcguguccgccgaguuccagcacaagcggacccugaccagcgacacgaagcuggccggcuucaugaaguucuacaacuccguguggaccuuccacggggagacccccaacgcgaccacggacuacagcuccaccagcaaccucuucgaggucgagaccgugauccacguggaguucuacaucaucccccgcucccaggagagcaagugcuccgaguacaucaacaccggccuguga

SEQ ID NO: 356 - RNA, 594 nt, Artificial Sequence
  derived and/or modified CDS sequence (opt1) from RVA/1076/P[6]__AAA47337.1__SP-IgE_P2_VP8*(65-223)
auggacuggaccuggauccuguuccucguggccgccgcgacccgcguccacagccaguacaucaaggccaacuccaaguucaucggcaucacggagcuggggagcggcuccgggcuggacggccccuaccagccgaccagcuucaagccgcccuccgacuacuggauccuccugaaccccaccaaccagcaggucgugcuggaggggaccaacaagacggacaucuggguggcccuccugcugguggagcccaacgugaccaaccagagccggcaguacacccucuucggcgagaccaagcagaucacggucgagaacaacaccaacaaguggaaguucuucgagauguuccgcuccagcguguccgccgaguuccagcacaagcggacccugaccagcgacacgaagcuggccggcuuccucaaguucuacaacuccguguggaccuucuacggggagacgccccacgcgaccaccgacuacagcuccaccagcaaccuguccgaggucgagaccgccauccacguggaguucuacaucaucccccgcagccaggaguccaagugcaacgaguacaucaacaccggccuguga

SEQ ID NO: 357 - RNA, 594 nt, Artificial Sequence
  derived and/or modified CDS sequence (opt1) from RVA/BE1128/P[8]__AEX30671.1__SP-IgE_P2_VP8*(65-223)
auggacuggaccuggauccuguuccucguggccgccgcgacccgcguccacagccaguacaucaaggccaacuccaaguucaucggcaucacggagcuggggagcggcuccgggcuggacggccccuaccagccgaccaccuucaccccgcccacggacuacuggauccucaucaccagcaacaccaacggggugguguacgaguccaccaacaacagcgacuucuggacggccgucaucgccguggagccccacgugaaccccgucgaccggcaguacaacguguucggcgagaacaagcaguucaacgugcgcaacgacuccgacaaguggaaguuccuggagauguuccggggcagcucccagaacgacuucuacaaccgccggacccugaccagcgacacccgccucgucgggauccugaaguacggcgggcggguguggacguuccacggcgagacgccccgcgccaccaccgacuccagcaacaccgcgaaccuggacgggaucuccaucaccauccacagcgaguucuacaucaucccccggucccaggagagcaagugcaacgaguacaucaacaacggccucuga

SEQ ID NO: 358 - RNA, 594 nt, Artificial Sequence
  derived and/or modified CDS sequence (opt1) from RVA/Wa-VirWa/P[8]__ACR22783.1__SP-IgE_P2_VP8*(65-223)
auggacuggaccuggauccuguuccucguggccgccgcgacccgcguccacagccaguacaucaaggccaacuccaaguucaucggcaucacggagcuggggagcggcuccgggcuggacggccccuaccagccgaccaccuucaccccgcccaacgacuacuggauccucaucaacagcaacacgaacggggugguguacgaguccaccaacaacagcgacuucuggaccgccgucguggccaucgagccccacgugaaccccgucgaccggcaguacaccaucuucggcgaguccaagcaguucaacgugcgcaacgacagcaacaaguggaaguuccuggagauguuccgguccagcucccagaacgaguucuacaaccgccggacgcugaccagcgacacccgccucgugggcauccugaaguacgggggccgggucuggaccuuccacggggagacgccccgcgccaccaccgacuccagcuccaccgcgaaccugaacaacaucagcaucacgauccacuccgaguucuacaucaucccccggagccaggaguccaagugcaacgaguacaucaacaacggccucuga

SEQ ID NO: 359 - RNA, 594 nt, Artificial Sequence
  derived and/or modified CDS sequence (opt1) from RVA/Wa/P[8]__AAA47290.1__SP-IgE_P2_VP8*(65-223)
auggacuggaccuggauccuguuccucguggccgccgcgacccgcguccacagccaguacaucaaggccaacuccaaguucaucggcaucacggagcuggggagcggcuccgggcuggacggccccuaccagccgaccaccuucaccccgcccaacgacuacuggauccucaucaacagcaacacgaacggggugguguacgaguccaccaacaacagcgacuucuggaccgccgucguggccaucgagccccacgugaaccccgucgaccggcaguacaccaucuucggcgaguccaagcaguucaacgugagcaacgacuccaacaaguggaaguuccuggagauguuccgcagcuccagccagaacgaguucuacaaccggcgcacgcugaccuccgacacccgguucgugggcauccucaaguacgggggccgcgucuggaccuuccacggggagacgccccgggccaccaccgacagcuccagcaccgcgaaccugaacaacaucuccaucacgauccacagcgaguucuacaucaucccccgcucccaggagagcaagugcaacgaguacaucaacaacggccuguga

SEQ ID NO: 360 - RNA, 594 nt, Artificial Sequence; identical to SEQ ID NO: 359
  derived and/or modified CDS sequence (opt1) from RVA/Wa/P[8]__AAA66953.1__SP-IgE_P2_VP8*(65-223)

SEQ ID NO: 361 - RNA, 666 nt, Artificial Sequence
  derived and/or modified CDS sequence (opt1) from RVA/BE1058/P[4]__AEX30665.1__SP-IgE_P2_VP8*(41-223)
auggacuggaccuggauccuguuccucguggccgccgcgacccgcguccacagccaguacaucaaggccaacuccaaguucaucggcaucacggagcuggggagcggcuccggggcccagacccgguacgcccccgugaacuggggccacggggagaucaacgacagcaccaccguggagccgguccuggacggccccuaccagcccacgaccuucaagcccccgaacgacuacuggcuccugaucuccagcaacaccgacggcgugguguacgaguccaccaacaacagcgacuucuggacggccgucaucgcgguggagccccacgugaaccagaccaaccgccaguacguccuguucggggagaacaagcaguucaacaucgagaacuccagcgacaaguggaaguucuucgagauguucaagggcaacucccagagcgacuucuccaaccggcgcacccucaccagcuccaaccggcugguggggaugcugaaguacggcgggcgcguguggacguuccacggcgagacgccccgggccaccaccgacagcuccagcaccgccgaccucaacaacaucuccaucaucauccacagcgaguucuacaucaucccccgcagccaggaguccaagugcaacgaguacaucaacaacggccuguga

SEQ ID NO: 362 - RNA, 666 nt, Artificial Sequence
  derived and/or modified CDS sequence (opt1) from RVA/DS-1/P[4]__CAD62680.1__SP-IgE_P2_VP8*(41-223)
auggacuggaccuggauccuguuccucguggccgccgcgacccgcguccacagccaguacaucaaggccaacuccaaguucaucggcaucacggagcuggggagcggcuccggggcccagacccgguacgcccccgugaacuggggcagcugggagaucaacgacuccaccaccguggagccgguccuggacgggcccuaccagcccacgaccuucaagcccccgaacgacuacuggcuccugaucagcuccaacaccaacggcgugguguacgagagcaccaacaacaacgacuucuggacggccgucuccagcguggagccccacgugucccagaccaaccgccaguacauccuguucggcgagaacaagcaguucaacgucgagaacaacagcgacaaguggaaguucuucgagaccuucaccggguccagccagggcaacuucuccaaccggcgcacgcucaccagcuccaaccggcugguggggaugcugaaguacggcgggcgcguguggaccuuccacggcgagacgccccgggcgaccaccgacagcuccaacaccgccgaccucaacaacaucagcaucaucauccacagcgaguucuacaucaucccccgcucccaggagagcaagugcaacgaguacaucaacaacggccuguga

SEQ ID NO: 363 - RNA, 666 nt, Artificial Sequence; identical to SEQ ID NO: 362
  derived and/or modified CDS sequence (opt1) from RVA/DS-1/P[4]__ABV53252.1__SP-IgE_P2_VP8*(41-223)

SEQ ID NO: 364 - RNA, 666 nt, Artificial Sequence
  derived and/or modified CDS sequence (opt1) from RVA/F01322/P[6]__AFA51886.1__SP-IgE_P2_VP8*(41-223)
auggacuggaccuggauccuguuccucguggccgccgcgacccgcguccacagccaguacaucaaggccaacuccaaguucaucggcaucacggagcuggggagcggcuccggggcccagaccaacuacgcccccgugaccuggagccacggcgaggugaacgacuccaccacgaucgagccgguccuggacgggcccuaccagcccaccaacuucaagcccccgaacgacuacuggauccuccugaaccccaccaaccagcaggucgugcuggagggcaccaacaagacggacaucuggguggcccuccugcugguggagcccaacgugaccaaccagagccggcaguacacccucuucggcgagaccaagcagaucacggucgagaacaacaccaacaaguggaaguucuucgagauguuccgcuccagcguguccgcggaguuccagcacaagcggacccugaccagcgacacgaagcuggccggguucaugaaguucuacaacuccguguggaccuuccacggcgagacccccaacgccaccacggacuacagcuccaccagcaaccucuucgaggucgagaccgugauccacguggaguucuacaucaucccgcgcucccaggagagcaagugcuccgaguacaucaacaccgggcuguga

SEQ ID NO: 365 - RNA, 666 nt, Artificial Sequence
  derived and/or modified CDS sequence (opt1) from RVA/1076/P[6]__AAA47337.1__SP-IgE_P2_VP8*(41-223)
auggacuggaccuggauccuguuccucguggccgccgcgacccgcguccacagccaguacaucaaggccaacuccaaguucaucggcaucacggagcuggggagcggcuccggggcccagaccaacuacgcccccgugaccuggagccacggcgaggugaacgacuccaccacgaucgagccgguccuggacgggcccuaccagcccaccagcuucaagcccccguccgacuacuggauccuccugaaccccaccaaccagcaggucgugcuggagggcaccaacaagacggacaucuggguggcccuccugcugguggagcccaacgugaccaaccagagccggcaguacacccucuucggcgagaccaagcagaucacggucgagaacaacaccaacaaguggaaguucuucgagauguuccgcuccagcguguccgcggaguuccagcacaagcggacccugaccagcgacacgaagcuggccggguuccucaaguucuacaacuccguguggaccuucuacggcgagacgccccacgccaccaccgacuacagcuccaccagcaaccuguccgaggucgagaccgccauccacguggaguucuacaucaucccgcgcagccaggaguccaagugcaacgaguacaucaacaccgggcuguga

SEQ ID NO: 366 - RNA, 666 nt, Artificial Sequence
  derived and/or modified CDS sequence (opt1) from RVA/BE1128/P[8]__AEX30671.1__SP-IgE_P2_VP8*(41-223)
auggacuggaccuggauccuguuccucguggccgccgcgacccgcguccacagccaguacaucaaggccaacuccaaguucaucggcaucacggagcuggggagcggcuccggggcccagacccgguacgcccccgugaacuggggccacggggagaucaacgacagcaccaccguggagccgauccuggacggccccuaccagcccacgaccuucacgcccccgaccgacuacuggauccucaucaccuccaacaccaacggcgucguguacgagagcaccaacaacuccgacuucuggaccgccgugaucgcggucgagccccacgugaaccccguggaccgccaguacaacgucuucggggagaacaagcaguucaacgugcggaacgacagcgacaaguggaaguuccuggagauguuccgcggcuccagccagaacgacuucuacaaccggcgcacgcugaccuccgacacccggcucguggggauccugaaguacggcgggcgcgucuggaccuuccacggcgagacgccccgggccaccaccgacagcuccaacaccgccaaccuggacggcaucagcaucacgauccacuccgaguucuacaucaucccgcgcagccaggaguccaagugcaacgaguacaucaacaacgggcucuga

SEQ ID NO: 367 - RNA, 666 nt, Artificial Sequence
  derived and/or modified CDS sequence (opt1) from RVA/Wa-VirWa/P[8]__ACR22783.1__SP-IgE_P2_VP8*(41-223)
auggacuggaccuggauccuguuccucguggccgccgcgacccgcguccacagccaguacaucaaggccaacuccaaguucaucggcaucacggagcuggggagcggcuccggggcccagacccgguacgcccccgugaacuggggccacggggagaucaacgacagcaccaccguggagccgauccuggacggccccuaccagcccacgaccuucacgcccccgaacgacuacuggauccucaucaacuccaacaccaacggcgucguguacgagagcaccaacaacuccgacuucuggaccgccguggucgcgaucgagccccacgugaaccccguggaccgccaguacaccaucuucggggagagcaagcaguucaacguccggaacgacuccaacaaguggaaguuccuggagauguuccgcagcuccagccagaacgaguucuacaaccggcgcacccugacguccgacacccggcucgugggcauccugaaguacgggggccgcguguggaccuuccacggggagacgccccgggccaccaccgacagcuccagcaccgccaaccugaacaacaucuccaucaccauccacagcgaguucuacaucaucccgcgcucccaggagagcaagugcaacgaguacaucaacaacggccucuga

SEQ ID NO: 368 - RNA, 666 nt, Artificial Sequence
  derived and/or modified CDS sequence (opt1) from RVA/Wa/P[8]__AAA47290.1__SP-IgE_P2_VP8*(41-223)
auggacuggaccuggauccuguuccucguggccgccgcgacccgcguccacagccaguacaucaaggccaacuccaaguucaucggcaucacggagcuggggagcggcuccggggcccagacccgguacgcccccgugaacuggggccacggggagaucaacgacagcaccaccguggagccgauccuggacggccccuaccagcccacgaccuucacgcccccgaacgacuacuggauccucaucaacuccaacaccaacggcgucguguacgagagcaccaacaacuccgacuucuggaccgccguggucgcgaucgagccccacgugaaccccguggaccgccaguacaccaucuucggggagagcaagcaguucaacgucuccaacgacagcaacaaguggaaguuccuggagauguuccgguccagcucccagaacgaguucuacaaccgccggacccugacgagcgacacccgcuucgugggcauccucaaguacgggggccggguguggaccuuccacggggagacgccccgcgccaccaccgacuccagcuccaccgccaaccugaacaacaucagcaucaccauccacuccgaguucuacaucaucccgcggagccaggagagcaagugcaacgaguacaucaacaacggccuguga

SEQ ID NO: 369 - RNA, 666 nt, Artificial Sequence
  derived and/or modified CDS sequence (opt1) from RVA/Wa/P[8]__AAA66953.1__SP-IgE_P2_VP8*(41-223)
auggacuggaccuggauccuguuccucguggccgccgcgacccgcguccacagccaguacaucaaggccaacuccaaguucaucggcaucacggagcuggggagcggcuccggggcccagacccgguacgcccccgugaacuggggccacggggagaucaacgacagcaccaccguggagccgaugcuggacggccccuaccagcccacgaccuucacgcccccgaacgacuacuggauccucaucaacuccaacaccaacggcgucguguacgagagcaccaacaacuccgacuucuggaccgccguggucgcgaucgagccccacgugaaccccguggaccgccaguacaccaucuucggggagagcaagcaguucaacgucuccaacgacagcaacaaguggaaguuccuggagauguuccgguccagcucccagaacgaguucuacaaccgccggacccugacgagcgacacccgcuucgugggcauccucaaguacgggggccggguguggaccuuccacggggagacgccccgcgccaccaccgacuccagcuccaccgccaaccugaacaacaucagcaucaccauccacuccgaguucuacaucaucccgcggagccaggagagcaagugcaacgaguacaucaacaacggccuguga

SEQ ID NO: 370 - RNA, 2328 nt, Artificial Sequence
  derived and/or modified CDS sequence (opt4) from RVA/BE1058/P[4]__AEX30665.1__VP4
auggccagccugaucuacagacagcugcugaccaacagcuacagcguggaccugcacgacgagaucgagcagaucggcagcgagaagacccagaacgugaccgugaaccccggccccuucgcccagaccagauacgcccccgugaacuggggccacggcgagaucaacgacagcaccaccguggagcccgugcuggacggccccuaccagcccaccaccuucaagccccccaacgacuacuggcugcugaucagcagcaacaccgacggcgugguguacgagagcaccaacaacagcgacuucuggaccgccgugaucgccguggagccccacgugaaccagaccaacagacaguacgugcuguucggcgagaacaagcaguucaacaucgagaacagcagcgacaaguggaaguucuucgagauguucaagggcaacagccagagcgacuucagcaacagaagaacccugaccagcagcaacagacuggugggcaugcugaaguacggcggcagaguguggaccuuccacggcgagacccccagagccaccaccgacagcagcagcaccgccgaccugaacaacaucagcaucaucauccacagcgaguucuacaucauccccagaagccaggagagcaagugcaacgaguacaucaacaacggccugccccccauccagaacaccagaaacguggugccccugagccugagcagcagaagcauccaguacagaagagcccaggugaacgaggacaucaccaucagcaagaccagccuguggaaggagaugcaguacaacagagacaucaucaucagauucaaguucggcaacagcgugaucaagcugggcggccugggcuacaaguggagcgagaucagcuacaaggccgccaacuaccaguacagcuacagcagagacggcgagcaggugaccgcccacaccaccugcagcgugaacggcgugaacaacuucagcuacaacggcggcagccugcccaccgacuucagcaucagcagauacgaggugaucaaggagaacagcuacguguacaucgacuacugggacgacagcaaggccuucagaaacaugguguacgugagaagccuggccgccaaccugaacagcgugaagugcgccggcggcagcuacgacuucagacugcccgugggcgaguggcccaucaugaacggcggcgccgugagccugcacuucgccggcgugacccugagcacccaguucaccgacuucgugagccugaacagccugagauucagauucagccugaccguggacgagcccagcuucagcaucaucagaaccagaaccaugaaccuguacggccugcccgccgccaaccccaacaacggcaacgaguacuacgaggugagcggcagauucagccugaucagccuggugcccaccaacgacgacuaccagacccccaucaugaacagcgugaccgugagacaggaccuggagagacagcugaacgaccugagagaggaguucaacagccugagccaggagaucgccaugagccagcugaucgaccuggcccugcugccccuggacauguucagcauguucagcggcaucaagagcaccaucgaccugaccaagagcauggccaccagcgugaugaagaaguucagaaagagcaagcuggccaccagcaucagcgagaugaccaacagccugagcgacgccgccagcagcgccagcagaagcgccagcaucagaagcaaccugagcgccaucagcaacuggagcgacgccagcaagagcgugcugaacgugaccgacagccugaacgacgugagcacccagaccagcaccaucagcaagaagcugagacugaaggagaugaucacccagaccgagggcaucaacuucgacgacaucagcgccgccgugcugaagaccaagauggacaugagcacccagaucggcaagaacacccugcccgacaucgugaccgaggccagcgagaaguucauccccaagagaagcuacagagugcugaaggacgacgaggugauggaggugaacaccgagggcaaguucuucgccuacaagguggacacccugaacgagauccccuucgacaucaacaaguucgccgagcuggugaccgacagccccgugaucagcgccaucaucgacuucaagacccugaagaaccugaacgacaacuacggcaucaccagaaucgaggcccuggaccugaucaagagcaaccccaacgugcugagaaacuucaucaaccagaacaaccccaucaucagaaacagaaucgagcagcugauccugcagugcaagcuguga

SEQ ID NO: 371 - RNA, 2328 nt, Artificial Sequence
  derived and/or modified CDS sequence (opt4) from RVA/DS-1/P[4]__CAD62680.1__VP4
auggccagccugaucuacagacagcugcugaccaacagcuacagcguggaccugcacgacgagaucgagcagaucggcagcgagaagacccagagcgugaccgugaaccccggccccuucgcccagaccagauacgcccccgugaacuggggcagcugggagaucaacgacagcaccaccguggagcccgugcuggacggccccuaccagcccaccaccuucaagccccccaacgacuacuggcugcugaucagcagcaacaccaacggcgugguguacgagagcaccaacaacaacgacuucuggaccgccgugagcagcguggagccccacgugagccagaccaacagacaguacauccuguucggcgagaacaagcaguucaacguggagaacaacagcgacaaguggaaguucuucgagaccuucaccggcagcagccagggcaacuucagcaacagaagaacccugaccagcagcaacagacuggugggcaugcugaaguacggcggcagaguguggaccuuccacggcgagacccccagagccaccaccgacagcagcaacaccgccgaccugaacaacaucagcaucaucauccacagcgaguucuacaucauccccagaagccaggagagcaagugcaacgaguacaucaacaacggccugccccccauccagaacaccagaaacguggugccccugagccugagcagcagaagcauccaguacaagagagcccaggugaacgaggacaucaccaucagcaagaccagccuguggaaggagaugcaguacaacagagacaucaucaucagauucaaguucggcaacagcaucaucaagcugggcggccugggcuacaaguggagcgagaucagcuacaaggccgccaacuaccaguacagcuacagcagagacggcgagcaggugaccgcccacaccaccugcagcgugaacggcgugaacaacuucagcuacaacggcggcagccugcccaccgacuucagcaucagcagauacgaggugaucaaggagaacagcuacguguacaucgacuacugggacgacagcaaggccuucagaaacaugguguacgugagaagccuggccgccaaccugaacagcgugaagugcaccggcggcagcuacaacuucagacugcccgugggcaaguggcccaucauggacggcggcgccgugagccugcacuucgccggcgugacccugagcacccaguucaccgacuucgugagccugaacagccugagauucagauucagccugaccguggacgagcccagcuucagcaucaucagaaccagaaccaucaaccuguacggccugcccgccgccaaccccaacaacggcaacgaguacuacgagaugagcggcagauucagccugaucagccuggugcagaccaacgacgacuaccagacccccaucaugaacagcgugaccgugagacaggaccuggagagacagcugaacgaccugagagaggaguucaacagccugagccaggagaucgccaugagccagcugaucgaccuggcccugcugccccuggacauguucagcauguucagcggcaucaagagcaccaucgaccugaccaagagcauggccaccagcgugaugaagaaguucagaaagagcaagcuggccaccagcaucagcgagaugaccaacagccugagcgacgccgccagcagcgccagcagaagcgccagcaucagaagcaaccugagcaccaucagcaacuggaccaacaccagcaagagcgugagcaacgugaccgacagcgugaacgacgugagcacccagaccagcaccaucagcaagaagcugagacugagagagaugaucacccagaccgagggccugagcuucgacgacaucagcgccgccgugcugaagaccaagaucgacaugagcacccagaucggcaagaacacccugcccgacaucgugaccgaggccagcgagaaguucauccccaagagaagcuacagagugcugaaggacgacgaggugauggagaucaacaccgagggcaaguucuucgccuacaagguggacacccugaacgagauccccuucgacaucaacaaguucgccgagcuggugaccgacagccccgugaucagcgccaucaucgacuucaagacccugaagaaccugaacgacaacuacggcaucaccagaaucgaggccuucaaccugaucaagagcaaccccaacgugcugagaaacuucaucaaccagaacaaccccaucaucagaaacagaaucgagcagcugauccugcagugcaagcuguga

SEQ ID NO: 372 - RNA, 2328 nt, Artificial Sequence; identical to SEQ ID NO: 371
  derived and/or modified CDS sequence (opt4) from RVA/DS-1/P[4]__ABV53252.1__VP4

SEQ ID NO: 373 - RNA, 2328 nt, Artificial Sequence
  derived and/or modified CDS sequence (opt4) from RVA/F01322/P[6]__AFA51886.1__VP4
auggccagccugaucuacagacagcugcugaccaacagcuacaccguggagcugagcgacgagaucaacaccaucggcagcgagaagaaccagaacgugaccaucaaccccggccccuucgcccagaccaacuacgcccccgugaccuggagccacggcgaggugaacgacagcaccaccaucgagcccgugcuggacggccccuaccagcccaccaacuucaagccccccaacgacuacuggauccugcugaaccccaccaaccagcagguggugcuggagggcaccaacaagaccgacaucuggguggcccugcugcugguggagcccaacgugaccaaccagagcagacaguacacccuguucggcgagaccaagcagaucaccguggagaacaacaccaacaaguggaaguucuucgagauguucagaagcagcgugagcgccgaguuccagcacaagagaacccugaccagcgacaccaagcuggccggcuucaugaaguucuacaacagcguguggaccuuccacggcgagacccccaacgccaccaccgacuacagcagcaccagcaaccuguucgagguggagaccgugauccacguggaguucuacaucauccccagaagccaggagagcaagugcagcgaguacaucaacaccggccugccccccaugcagaacaccagaaacaucgugcccguggcccugagcagcagaagcgugaccuaccagagagcccaggugaacgaggacaucaucaucagcaagaccagccuguggaaggagaugcaguacaacagagacaucaucaucagauucaaguucaacaacagcaucgugaagcugggcggccugggcuacaaguggagcgagaucagcuucaaggccgccaacuaccaguacaacuaccugagagacggcgagcaggugaccgcccacaccaccugcagcgugaacggcgugaacaacuucagcuacaacggcggcagccugcccaccgacuucagcgugagcagauacgaggugaucaaggagaacagcuacguguacguggacuacugggacgacagccaggccuucagaaacaugguguacgugagaagccuggccgccaaccugaacagcgugaagugcagcggcggcaacuacaacuuccagauccccgugggcgccuggcccgugaugagcggcggcgccgugagccugcacuucgccggcgugacccugagcacccaguucaccgacuucgugagccugaacagccugagauucagauucagccugaccguggaggagccccccuucagcauccugagaaccagagugagcggccuguacggccugcccgccuucgaccccaacaacggccacgaguacuacgagaucaacggcagauucagccugaucagccuggugcccagcaacgacgacuaccagacccccaucaugaacagcgugaccgugagacaggaccuggagagacagcugggcgaccugagagaggaguucaacagccugagccaggagaucgccaugacccagcugaucgaccuggcccugcugccccuggacauguucagcauguucagcggcaucaagagcaccaucgacgccgccaagagcauggccaccaaggugaugaagaaguucaagaagagcggccuggccaccagcaucagcgagcugaccggcagccugagcaacgccgccagcagcgugagcagaaacagcagcaucagaagcaacaucagcagcaucagcguguggaccgacgugagcgagcagaucgccggcaccagcgacagcgugagaaacaucagcacccagaccagcgccaucagcaagaagcugagacugagagagaucaccacccagaccgagggcaugaacuucgacgacaucagcgccgccgugcugaagaccaagaucgacaagagcacccacaucagccccgacacccugcccgacaucaucaccgagagcagcgagaaguucauccccaagagagccuacagagugcugaaggacgacgaggugauggaggccgacguggacggcaaguucuucgccuacaagguggacaccuucgaggaggugcccuucgacguggacaaguucguggaccuggugaccgacagccccgugaucagcgccaucaucgacuucaagacccugaagaaccugaacgacaacuacggcaucaccagaagccaggcccuggaccugaucagaagcgaccccagagugcugagagacuucaucaaccagaacaaccccaucaucaagaacagaaucgagcagcugauccugcagugcagacuguga

SEQ ID NO: 374 - RNA, 2328 nt, Artificial Sequence
  derived and/or modified CDS sequence (opt4) from RVA/1076/P[6]__AAA47337.1__VP4
auggccagccugaucuacagacagcugcugaccaacagcuacaccguggagcugagcgacgagaucaacaccaucggcagcgagaagagccagaacgugaccaucaaccccggccccuucgcccagaccaacuacgcccccgugaccuggagccacggcgaggugaacgacagcaccaccaucgagcccgugcuggacggccccuaccagcccaccagcuucaagccccccagcgacuacuggauccugcugaaccccaccaaccagcagguggugcuggagggcaccaacaagaccgacaucuggguggcccugcugcugguggagcccaacgugaccaaccagagcagacaguacacccuguucggcgagaccaagcagaucaccguggagaacaacaccaacaaguggaaguucuucgagauguucagaagcagcgugagcgccgaguuccagcacaagagaacccugaccagcgacaccaagcuggccggcuuccugaaguucuacaacagcguguggaccuucuacggcgagaccccccacgccaccaccgacuacagcagcaccagcaaccugagcgagguggagaccgccauccacguggaguucuacaucauccccagaagccaggagagcaagugcaacgaguacaucaacaccggccugccccccaugcagaacaccagaaacaucgugcccguggcccugagcagcagaagcgugaccuaccagagagcccaggugaacgaggacaucaucaucagcaagaccagccuguggaaggagaugcaguacaacagagacaucaucaucagauucaaguucaacaacagcaucgugaagcugggcggccugggcuacaaguggcccgagaucagcuucaaggccgccaacuaccaguacaacuaccugagagacggcgagcaggugauggcccacaccaccugcagcgugaacggcgagaacaacuacagcuacaacggcggccugcugcccacccacuucagcgugagcagauacgaggugaucaaggagaacagcuacguguacgacaacuacugggacgacagccaggccuucagaaacaugguguacgugagaagccuggccgccaaccugaacagcgugaagugcagcggcggcaacuacaacuuccagaugcccgugggcgccuggcccgugaugagcggcggcgccgugagccugcacuucgccggcgugacccugagcaccgaguucaccgacuucgugagccugaacagccugagauucagauucagccugaccguggaggagccccccuucagcauccugagaaccagagugagcggccuguacggccugcccgccuucaaccccaacaacggccacgaguacuacgagaucgccggcagauucagcuucauccugcuggugcccagcaacgacgacuaccagacccccaucaugaacagcgugaccgugagacaggaccuggagagacagcugggcgaccugagagaggaguucaacagccugagccaggagaucgccaugacccagcugaucgaccuggcccugcugccccuggacauguucagcauguucagcggcaucaagagcaccaucgacgccgccaagagcauggccaccauggugaugaagaaguucaagaagagcggccuggccaccagcaucagcgagcugaccagaagccugagcaacgccgccagcagcgugagcagaagcagcagcaucaagagcaacaucagcagcaucagcguguggaccgacgugagcgagcagaucaccggcagcagcgacagcgugagaaacaucagcacccagaccagcgccaucagcaagagacugagacugagagagaucaccacccagaccgagggcaugaacuucaucgacaucagcgccgccgugcugaagaccaagaucgacaagagcacccacaucagccccgacacccugcccgacaucaucaccgagagcagcgagaaguuccugcccaagagagccuacagagugcugaaggacgacgaggugauggagguggacguggacggcaaguucuucgccuacaagguggacaccuucgaggaggugcccuucgacguggacaaguucguggaccuggugaccgacagccccgugaucagcgccaucaucgacuucaagacccugaagaaccugaacgacaacuacggcaucaccagaagccaggcccuggaccugaucagaagcgaccccagagugcugagagacuucaucaaccagaacaaccccaucaucaagaacagaaucgagcagcugauccugcagugcagacuguga

SEQ ID NO: 375 - RNA, 2328 nt, Artificial Sequence
  derived and/or modified CDS sequence (opt4) from RVA/BE1128/P[8]__AEX30671.1__VP4
auggccagccugaucuacagacagcugcugaccaacagcuacagcguggaccugcacgacgagaucgagcagaucggcagcgagaagacccagaacgugaccgugaaccccggccccuucgcccagaccagauacgcccccgugaacuggggccacggcgagaucaacgacagcaccaccguggagcccauccuggacggccccuaccagcccaccaccuucaccccccccaccgacuacuggauccugaucaccagcaacaccaacggcgugguguacgagagcaccaacaacagcgacuucuggaccgccgugaucgccguggagccccacgugaaccccguggacagacaguacaacguguucggcgagaacaagcaguucaacgugagaaacgacagcgacaaguggaaguuccuggagauguucagaggcagcagccagaacgacuucuacaacagaagaacccugaccagcgacaccagacuggugggcauccugaaguacggcggcagaguguggaccuuccacggcgagacccccagagccaccaccgacagcagcaacaccgccaaccuggacggcaucagcaucaccauccacagcgaguucuacaucauccccagaagccaggagagcaagugcaacgaguacaucaacaacggccugccccccauccagaacaccagaaacguggugccccugagccugagcagcagaagcauccaguacaagagagcccaggugaacgaggacaucaccaucagcaagaccagccuguggaaggagaugcaguacaacagagacaucaucaucagauucaaguucggcaacagcaucgugaagcugggcggccugggcuacaaguggagcgagaucagcuacaaggccgccaacuaccaguacaacuaccugagagacggcgagcaggugaccgcccacaccaccugcagcgugaacggcgugaacaacuucagcuacaacggcggcagccugcccaccgacuucagcgugagcagauacgaggugaucaaggagaacagcuacguguacguggacuacugggacgacagcaaggccuucagaaacaugguguacgugagaagccuggccgccaaccugaacagcgugaagugcaccggcggcagcuacgacuucagcauccccgugggcgccuggcccgugaugaacggcggcgccgugagccugcacuucgccggcgugacccugagcacccaguucaccgacuucgugagccugaacagccugagauucagauucagccugaccguggacgagcccagcuucagcauccugagaaccagaaccgugaaccuguacggccugcccgccgccaaccccaacaacggcaacgaguacuacgagaucagcggcagauucagccugaucagccuggugcccaccaacgacgacuaccagacccccaucaugaacagcgugaccgugagacaggaccuggagagacagcugaccgaccugagagaggaguucaacagccugagccaggagaucgccaugagccagcugaucgaccuggcccugcugccccuggacauguucagcauguucagcggcaucaagagcaccaucgaccugaccaagagcauggccaccagcgugaugaagaaguucagaaagagcaagcuggccaccagcgugagcgagaugaccaacagccugagcgacgccgccagcagcgccagcagaagcgugagcgugagaagcaacaucagcgccgugagcaacuggaccaacgugagcaacgacgugagcaacgugaccaacagcgugaacgacaucagcacccagaccagcaccaucagcaagaaccugagacugaaggagaugaucacccagaccgagggcaugagcuucgacgacaucagcgccgccgugcugaagaccaagaucgacaugagcacccagaucggcaagaacacccugcccgacaucgugaccgaggccagcgagaaguucauccccaagagaagcuacagaauccugaaggacgacgaggugauggagaucaacaccgagggcaaguucuucgccuacaagaucgacacccugaacgaggugcccuucgacgugaacaaguucaccgagcuggugaccaacagccccgugaucagcgccaucaucgacuucaagacccugaagaaccugaacgacaacuacggcaucaccagaaccgaggcccugaaccugaucaagagcaaccccaacgugcugagaaacuucaucaaccagaacaaccccaucaucagaaacagaaucgagcagcugauccugcagugcaagcuguga

SEQ ID NO: 376 - RNA, 2328 nt, Artificial Sequence
  derived and/or modified CDS sequence (opt4) from RVA/Wa-VirWa/P[8]__ACR22783.1__VP4
auggccagccugaucuacagacagcugcugaccaacagcuacagcguggaccugcacgacgagaucgagcagaucggcagcgagaagacccagaacgugaccaucaaccccagccccuucgcccagaccagauacgcccccgugaacuggggccacggcgagaucaacgacagcaccaccguggagcccauccuggacggccccuaccagcccaccaccuucaccccccccaacgacuacuggauccugaucaacagcaacaccaacggcgugguguacgagagcaccaacaacagcgacuucuggaccgccgugguggccaucgagccccacgugaaccccguggacagacaguacaccaucuucggcgagagcaagcaguucaacgugagaaacgacagcaacaaguggaaguuccuggagauguucagaagcagcagccagaacgaguucuacaacagaagaacccugaccagcgacaccagacuggugggcauccugaaguacggcggcagaguguggaccuuccacggcgagacccccagagccaccaccgacagcagcagcaccgccaaccugaacaacaucagcaucaccauccacagcgaguucuacaucauccccagaagccaggagagcaagugcaacgaguacaucaacaacggccugccccccauccagaacaccagaaacguggugccccugccccugagcagcagaagcauccaguacaagagagcccaggugaacgaggacaucaucgugagcaagaccagccuguggaaggagaugcaguacaacagagacaucaucaucagauucaaguucggcaacagcaucgugaagaugggcggccugggcuacaaguggagcgagaucagcuacaaggccgccaacuaccaguacaacuaccugagagacggcgagcaggugaccgcccacaccaccugcagcgugaacggcgugaacaacuucagcuacaacggcggcagccugcccaccgacuucggcaucagcagauacgaggugaucaaggagaacagcuacguguacguggacuacugggacgacagcaaggccuucagaaacaugguguacgugagaagccuggccgccaaccugaacagcgugaagugcaccggcggcagcuacgacuucagcauccccgugggcgccuggcccgugaugaacggcggcgccgugagccugcacuucgccggcgugacccugagcacccaguucaccgacuucgugagccugaacagccugagauucagauucagccugaccguggacgagccccccuucagcauccugagaaccagaaccgugaaccuguacggccugcccgccgccaaccccaacaacggcaacgaguacuacgagaucagcggcagauucagccugaucagccuggugcccaccaacgacgacuaccagacccccaucaugaacagcgugaccgugagacaggaccuggagagacagcugaccgaccugagagaggaguucaacagccugagccaggagaucgccauggcccagcugaucgaccuggcccugcugccccuggacauguucagcauguucagcggcaucaagagcaccaucgaccugaccaagagcauggccaccagcgugaugaagaaguucagaaagagcaagcuggccaccagcaucagcgagaugaccaacagccugagcgacgccgccagcagcgccagcagaaacgugagcaucagaagcaaccugagcgccaucagcaacuggaccaacgugagcaacgacgugagcaacgugaccaacagccugaacgacaucagcacccagaccagcaccaucagcaagaagcugagacugaaggagaugaucacccagaccgagggcaugagcuucgacgacaucagcgccgccgugcugaagaccaagaucgacaugagcacccagaucggcaagaacacccugcccgacaucgugaccgaggccagcgagaaguucauccccaagagaagcuacagaauccugaaggacgacgaggugauggagaucaacaccgagggcaaguucuucgccuacaagaucaacaccuucgacgaggugcccuucgacgugaacaaguucgccgagcuggugaccgacagccccgugaucagcgccaucaucgacuucaagacccugaagaaccugaacgacaacuacggcaucaccagaaccgaggcccugaaccugaucaagagcaaccccaacaugcugagaaacuucaucaaccagaacaaccccaucaucagaaacagaaucgagcagcugauccugcagugcaagcuguga

SEQ ID NO: 377 - RNA, 2328 nt, Artificial Sequence
  derived and/or modified CDS sequence (opt4) from RVA/Wa/P[8]__AAA47290.1__VP4
auggccagccugaucuacagacagcugcugaccaacagcuacagcguggaccugcacgacgagaucgagcagaucggcagcgagaagacccagaacgugaccaucaaccccagccccuucgcccagaccagauacgcccccgugaacuggggccacggcgagaucaacgacagcaccaccguggagcccauccuggacggccccuaccagcccaccaccuucaccccccccaacgacuacuggauccugaucaacagcaacaccaacggcgugguguacgagagcaccaacaacagcgacuucuggaccgccgugguggccaucgagccccacgugaaccccguggacagacaguacaccaucuucggcgagagcaagcaguucaacgugagcaacgacagcaacaaguggaaguuccuggagauguucagaagcagcagccagaacgaguucuacaacagaagaacccugaccagcgacaccagauucgugggcauccugaaguacggcggcagaguguggaccuuccacggcgagacccccagagccaccaccgacagcagcagcaccgccaaccugaacaacaucagcaucaccauccacagcgaguucuacaucauccccagaagccaggagagcaagugcaacgaguacaucaacaacggccugccccccauccagaacaccagaaacguggugccccugccccugagcagcagaagcauccaguacaagagagcccaggugaacgaggacaucaucgugagcaagaccagccuguggaaggagaugcaguacaacagagacaucaucaucagauucaaguucggcaacagcaucgugaagaugggcggccugggcuacaaguggagcgagaucagcuacaaggccgccaacuaccaguacaacuaccugagagacggcgagcaggugaccgcccacaccaccugcagcgugaacggcgugaacaacuucagcuacaacggcggcagccugcccaccgacuucggcaucagcagauacgaggugaucaaggagaacagcuacguguacguggacuacugggacgacagcaaggccuucagaaacaugguguacgugagaagccuggccgccaaccugaacagcgugaagugcaccggcggcagcuacaacuucagccugcccgugggcgccuggcccgugaugaacggcggcgccgugagccugcacuucgccggcgugacccugagcacccaguucaccgacuucgugagccugaacagccugagauucagauucagccugaccguggacgagccccccuucagcauccugagaaccagaaccgugaaccuguacggccugcccgccgccaaccccaacaacggcaacgaguacuacgagaucagcggcagauucagccugaucuaccuggugcccaccaacgacgacuaccagacccccaucaugaacagcgugaccgugagacaggaccuggagagacagcugaccgaccugagagaggaguucaacagccugagccaggagaucgccauggcccagcugaucgaccuggcccugcugccccugggcauguucagcauguucagcggcaucaagagcaccaucgaccugaccaagagcauggccaccagcgugaugaagaaguucagaaagagcaagcuggccaccagcaucagcgagaugaccaacagccugagcgacgccgccagcagcgccagcagaaacgugagcaucagaagcaaccugagcgccaucagcaacuggaccaacgugagcaacgacgugagcaacgugaccaacagccugaacgacaucagcacccagaccagcaccaucagcaagaaguucagacugaaggagaugaucacccagaccgagggcaugagcuucgacgacaucagcgccgccgugcugaagaccaagaucgacaugagcacccagaucggcaagaacacccugcccgacaucgugaccgaggccagcgagaaguucauccccaagagaagcuacagaauccugaaggacgacgaggugauggagaucaacaccgagggcaaguucuucgccuacaagaucaacaccuucgacgaggugcccuucgacgugaacaaguucgccgagcuggugaccgacagccccgugaucagcgccaucaucgacuucaagacccugaagaaccugaacgacaacuacggcaucaccagaaccgaggcccugaaccugaucaagagcaaccccaacaugcugagaaacuucaucaaccagaacaaccccaucaucagaaacagaaucgagcagcugauccugcagugcaagcuguga

SEQ ID NO: 378 - RNA, 2328 nt, Artificial Sequence
  derived and/or modified CDS sequence (opt4) from RVA/Wa/P[8]__AAA66953.1__VP4
auggccagccugaucuacagacagcugcugaccaacagcuacagcguggaccugcacgacgagaucgagcagaucggcagcgagaagacccagaacgugaccaucaaccccagccccuucgcccagaccagauacgcccccgugaacuggggccacggcgagaucaacgacagcaccaccguggagcccaugcuggacggccccuaccagcccaccaccuucaccccccccaacgacuacuggauccugaucaacagcaacaccaacggcgugguguacgagagcaccaacaacagcgacuucuggaccgccgugguggccaucgagccccacgugaaccccguggacagacaguacaccaucuucggcgagagcaagcaguucaacgugagcaacgacagcaacaaguggaaguuccuggagauguucagaagcagcagccagaacgaguucuacaacagaagaacccugaccagcgacaccagauucgugggcauccugaaguacggcggcagaguguggaccuuccacggcgagacccccagagccaccaccgacagcagcagcaccgccaaccugaacaacaucagcaucaccauccacagcgaguucuacaucauccccagaagccaggagagcaagugcaacgaguacaucaacaacggccugccccccauccagaacaccagaaacguggugccccugccccugagcagcagaagcauccaguacaagagagcccaggugaacgaggacaucaucgugagcaagaccagccuguggaaggagaugcaguacaacagagacaucaucaucagauucaaguucggcaacagcaucgugaagaugggcggccugggcuacaaguggagcgagaucagcuacaaggccgccaacuaccaguacaacuaccugagagacggcgagcaggugaccgcccacaccaccugcagcgugaacggcgugaacaacuucagcuacaacggcggcuuccugcccaccgacuucggcaucagcagauacgaggugaucaaggagaacagcuacguguacguggacuacugggacgacagcaaggccuucagaaacaugguguacgugagaagccuggccgccaaccugaacagcgugaagugcaccggcggcagcuacaacuucagcauccccgugggcgccuggcccgugaugaacggcggcgccgugagccugcacuucgccggcgugacccugagcacccaguucaccgacuucgugagccugaacagccugagauucagauucagccugaccguggacgagccccccuucagcauccugagaaccagaaccgugaaccuguacggccugcccgccgccaaccccaacaacggcaacgaguacuacgagaucagcggcagauucagccugaucuaccuggugcccaccaacgacgacuaccagacccccaucaugaacagcgugaccgugagacaggaccuggagagacagcugaccgaccugagagaggaguucaacagccugagccaggagaucgccauggcccagcugaucgaccuggcccugcugccccuggacauguucagcauguucagcggcaucaagagcaccaucgaccugaccaagagcauggccaccagcgugaugaagaaguucagaaagagcaagcuggccaccagcaucagcgagaugaccaacagccugagcgacgccgccagcagcgccagcagaaacgugagcaucagaagcaaccugagcgccaucagcaacuggaccaacgugagcaacgacgugagcaacgugaccaacagccugaacgacaucagcacccagaccagcaccaucagcaagaaguucagacugaaggagaugaucacccagaccgagggcaugagcuucgacgacaucagcgccgccgugcugaagaccaagaucgacaugagcacccagaucggcaagaacacccugcccgacaucgugaccgaggccagcgagaaguucauccccaagagaagcuacagaauccugaaggacgacgaggugauggagaucaacaccgagggcaaguucuucgccuacaagaucaacaccuucgacgaggugcccuucgacgugaacaaguucgccgagcuggugaccgacagccccgugaucagcgccaucaucgacuucaagacccugaagaaccugaacgacaacuacggcaucaccagaaccgaggcccugaaccugaucaagagcaaccccaacaugcugagaaacuucaucaaccagaacaaccccaucaucagaaacagaaucgagcagcugauccugcagugcaagcuguga

SEQ ID NO: 379 - RNA, 720 nt, Artificial Sequence
  derived and/or modified CDS sequence (opt4) from RVA/BE1058/P[4]__AEX30665.1__VP8*
auggccagccugaucuacagacagcugcugaccaacagcuacagcguggaccugcacgacgagaucgagcagaucggcagcgagaagacccagaacgugaccgugaaccccggccccuucgcccagaccagauacgcccccgugaacuggggccacggcgagaucaacgacagcaccaccguggagcccgugcuggacggccccuaccagcccaccaccuucaagccccccaacgacuacuggcugcugaucagcagcaacaccgacggcgugguguacgagagcaccaacaacagcgacuucuggaccgccgugaucgccguggagccccacgugaaccagaccaacagacaguacgugcuguucggcgagaacaagcaguucaacaucgagaacagcagcgacaaguggaaguucuucgagauguucaagggcaacagccagagcgacuucagcaacagaagaacccugaccagcagcaacagacuggugggcaugcugaaguacggcggcagaguguggaccuuccacggcgagacccccagagccaccaccgacagcagcagcaccgccgaccugaacaacaucagcaucaucauccacagcgaguucuacaucauccccagaagccaggagagcaagugcaacgaguacaucaacaacggccugccccccauccagaacaccagaaacguggugccccugagccugagcagcaga

SEQ ID NO: 380 - RNA, 720 nt, Artificial Sequence
  derived and/or modified CDS sequence (opt4) from RVA/DS-1/P[4]__CAD62680.1__VP8*
auggccagccugaucuacagacagcugcugaccaacagcuacagcguggaccugcacgacgagaucgagcagaucggcagcgagaagacccagagcgugaccgugaaccccggccccuucgcccagaccagauacgcccccgugaacuggggcagcugggagaucaacgacagcaccaccguggagcccgugcuggacggccccuaccagcccaccaccuucaagccccccaacgacuacuggcugcugaucagcagcaacaccaacggcgugguguacgagagcaccaacaacaacgacuucuggaccgccgugagcagcguggagccccacgugagccagaccaacagacaguacauccuguucggcgagaacaagcaguucaacguggagaacaacagcgacaaguggaaguucuucgagaccuucaccggcagcagccagggcaacuucagcaacagaagaacccugaccagcagcaacagacuggugggcaugcugaaguacggcggcagaguguggaccuuccacggcgagacccccagagccaccaccgacagcagcaacaccgccgaccugaacaacaucagcaucaucauccacagcgaguucuacaucauccccagaagccaggagagcaagugcaacgaguacaucaacaacggccugccccccauccagaacaccagaaacguggugccccugagccugagcagcaga

SEQ ID NO: 381 - RNA, 720 nt, Artificial Sequence; identical to SEQ ID NO: 380
  derived and/or modified CDS sequence (opt4) from RVA/DS-1/P[4]__ABV53252.1__VP8*

SEQ ID NO: 382 - RNA, 720 nt, Artificial Sequence
  derived and/or modified CDS sequence (opt4) from RVA/F01322/P[6]__AFA51886.1__VP8*
auggccagccugaucuacagacagcugcugaccaacagcuacaccguggagcugagcgacgagaucaacaccaucggcagcgagaagaaccagaacgugaccaucaaccccggccccuucgcccagaccaacuacgcccccgugaccuggagccacggcgaggugaacgacagcaccaccaucgagcccgugcuggacggccccuaccagcccaccaacuucaagccccccaacgacuacuggauccugcugaaccccaccaaccagcagguggugcuggagggcaccaacaagaccgacaucuggguggcccugcugcugguggagcccaacgugaccaaccagagcagacaguacacccuguucggcgagaccaagcagaucaccguggagaacaacaccaacaaguggaaguucuucgagauguucagaagcagcgugagcgccgaguuccagcacaagagaacccugaccagcgacaccaagcuggccggcuucaugaaguucuacaacagcguguggaccuuccacggcgagacccccaacgccaccaccgacuacagcagcaccagcaaccuguucgagguggagaccgugauccacguggaguucuacaucauccccagaagccaggagagcaagugcagcgaguacaucaacaccggccugccccccaugcagaacaccagaaacaucgugcccguggcccugagcagcaga

SEQ ID NO: 383 - RNA, 720 nt, Artificial Sequence
  derived and/or modified CDS sequence (opt4) from RVA/1076/P[6]__AAA47337.1__VP8*
auggccagccugaucuacagacagcugcugaccaacagcuacaccguggagcugagcgacgagaucaacaccaucggcagcgagaagagccagaacgugaccaucaaccccggccccuucgcccagaccaacuacgcccccgugaccuggagccacggcgaggugaacgacagcaccaccaucgagcccgugcuggacggccccuaccagcccaccagcuucaagccccccagcgacuacuggauccugcugaaccccaccaaccagcagguggugcuggagggcaccaacaagaccgacaucuggguggcccugcugcugguggagcccaacgugaccaaccagagcagacaguacacccuguucggcgagaccaagcagaucaccguggagaacaacaccaacaaguggaaguucuucgagauguucagaagcagcgugagcgccgaguuccagcacaagagaacccugaccagcgacaccaagcuggccggcuuccugaaguucuacaacagcguguggaccuucuacggcgagaccccccacgccaccaccgacuacagcagcaccagcaaccugagcgagguggagaccgccauccacguggaguucuacaucauccccagaagccaggagagcaagugcaacgaguacaucaacaccggccugccccccaugcagaacaccagaaacaucgugcccguggcccugagcagcaga

SEQ ID NO: 384 - RNA, 720 nt, Artificial Sequence
  derived and/or modified CDS sequence (opt4) from RVA/BE1128/P[8]__AEX30671.1__VP8*
auggccagccugaucuacagacagcugcugaccaacagcuacagcguggaccugcacgacgagaucgagcagaucggcagcgagaagacccagaacgugaccgugaaccccggccccuucgcccagaccagauacgcccccgugaacuggggccacggcgagaucaacgacagcaccaccguggagcccauccuggacggccccuaccagcccaccaccuucaccccccccaccgacuacuggauccugaucaccagcaacaccaacggcgugguguacgagagcaccaacaacagcgacuucuggaccgccgugaucgccguggagccccacgugaaccccguggacagacaguacaacguguucggcgagaacaagcaguucaacgugagaaacgacagcgacaaguggaaguuccuggagauguucagaggcagcagccagaacgacuucuacaacagaagaacccugaccagcgacaccagacuggugggcauccugaaguacggcggcagaguguggaccuuccacggcgagacccccagagccaccaccgacagcagcaacaccgccaaccuggacggcaucagcaucaccauccacagcgaguucuacaucauccccagaagccaggagagcaagugcaacgaguacaucaacaacggccugccccccauccagaacaccagaaacguggugccccugagccugagcagcaga

SEQ ID NO: 385 - RNA, 720 nt, Artificial Sequence
  derived and/or modified CDS sequence (opt4) from RVA/Wa-VirWa/P[8]__ACR22783.1__VP8*
auggccagccugaucuacagacagcugcugaccaacagcuacagcguggaccugcacgacgagaucgagcagaucggcagcgagaagacccagaacgugaccaucaaccccagccccuucgcccagaccagauacgcccccgugaacuggggccacggcgagaucaacgacagcaccaccguggagcccauccuggacggccccuaccagcccaccaccuucaccccccccaacgacuacuggauccugaucaacagcaacaccaacggcgugguguacgagagcaccaacaacagcgacuucuggaccgccgugguggccaucgagccccacgugaaccccguggacagacaguacaccaucuucggcgagagcaagcaguucaacgugagaaacgacagcaacaaguggaaguuccuggagauguucagaagcagcagccagaacgaguucuacaacagaagaacccugaccagcgacaccagacuggugggcauccugaaguacggcggcagaguguggaccuuccacggcgagacccccagagccaccaccgacagcagcagcaccgccaaccugaacaacaucagcaucaccauccacagcgaguucuacaucauccccagaagccaggagagcaagugcaacgaguacaucaacaacggccugccccccauccagaacaccagaaacguggugccccugccccugagcagcaga

SEQ ID NO: 386 - RNA, 720 nt, Artificial Sequence
  derived and/or modified CDS sequence (opt4) from RVA/Wa/P[8]__AAA47290.1__VP8*
auggccagccugaucuacagacagcugcugaccaacagcuacagcguggaccugcacgacgagaucgagcagaucggcagcgagaagacccagaacgugaccaucaaccccagccccuucgcccagaccagauacgcccccgugaacuggggccacggcgagaucaacgacagcaccaccguggagcccauccuggacggccccuaccagcccaccaccuucaccccccccaacgacuacuggauccugaucaacagcaacaccaacggcgugguguacgagagcaccaacaacagcgacuucuggaccgccgugguggccaucgagccccacgugaaccccguggacagacaguacaccaucuucggcgagagcaagcaguucaacgugagcaacgacagcaacaaguggaaguuccuggagauguucagaagcagcagccagaacgaguucuacaacagaagaacccugaccagcgacaccagauucgugggcauccugaaguacggcggcagaguguggaccuuccacggcgagacccccagagccaccaccgacagcagcagcaccgccaaccugaacaacaucagcaucaccauccacagcgaguucuacaucauccccagaagccaggagagcaagugcaacgaguacaucaacaacggccugccccccauccagaacaccagaaacguggugccccugccccugagcagcaga

SEQ ID NO: 387 - RNA, 720 nt, Artificial Sequence
  derived and/or modified CDS sequence (opt4) from RVA/Wa/P[8]__AAA66953.1__VP8*
auggccagccugaucuacagacagcugcugaccaacagcuacagcguggaccugcacgacgagaucgagcagaucggcagcgagaagacccagaacgugaccaucaaccccagccccuucgcccagaccagauacgcccccgugaacuggggccacggcgagaucaacgacagcaccaccguggagcccaugcuggacggccccuaccagcccaccaccuucaccccccccaacgacuacuggauccugaucaacagcaacaccaacggcgugguguacgagagcaccaacaacagcgacuucuggaccgccgugguggccaucgagccccacgugaaccccguggacagacaguacaccaucuucggcgagagcaagcaguucaacgugagcaacgacagcaacaaguggaaguuccuggagauguucagaagcagcagccagaacgaguucuacaacagaagaacccugaccagcgacaccagauucgugggcauccugaaguacggcggcagaguguggaccuuccacggcgagacccccagagccaccaccgacagcagcagcaccgccaaccugaacaacaucagcaucaccauccacagcgaguucuacaucauccccagaagccaggagagcaagugcaacgaguacaucaacaacggccugccccccauccagaacaccagaaacguggugccccugccccugagcagcaga

SEQ ID NO: 388 - RNA, 477 nt, Artificial Sequence
  derived and/or modified CDS sequence (opt4) from RVA/BE1058/P[4]__AEX30665.1__VP8*(65-223)
cuggacggccccuaccagcccaccaccuucaagccccccaacgacuacuggcugcugaucagcagcaacaccgacggcgugguguacgagagcaccaacaacagcgacuucuggaccgccgugaucgccguggagccccacgugaaccagaccaacagacaguacgugcuguucggcgagaacaagcaguucaacaucgagaacagcagcgacaaguggaaguucuucgagauguucaagggcaacagccagagcgacuucagcaacagaagaacccugaccagcagcaacagacuggugggcaugcugaaguacggcggcagaguguggaccuuccacggcgagacccccagagccaccaccgacagcagcagcaccgccgaccugaacaacaucagcaucaucauccacagcgaguucuacaucauccccagaagccaggagagcaagugcaacgaguacaucaacaacggccug

SEQ ID NO: 389 - RNA, 477 nt, Artificial Sequence
  derived and/or modified CDS sequence (opt4) from RVA/DS-1/P[4]__CAD62680.1__VP8*(65-223)
cuggacggccccuaccagcccaccaccuucaagccccccaacgacuacuggcugcugaucagcagcaacaccaacggcgugguguacgagagcaccaacaacaacgacuucuggaccgccgugagcagcguggagccccacgugagccagaccaacagacaguacauccuguucggcgagaacaagcaguucaacguggagaacaacagcgacaaguggaaguucuucgagaccuucaccggcagcagccagggcaacuucagcaacagaagaacccugaccagcagcaacagacuggugggcaugcugaaguacggcggcagaguguggaccuuccacggcgagacccccagagccaccaccgacagcagcaacaccgccgaccugaacaacaucagcaucaucauccacagcgaguucuacaucauccccagaagccaggagagcaagugcaacgaguacaucaacaacggccug

SEQ ID NO: 390 - RNA, 477 nt, Artificial Sequence; identical to SEQ ID NO: 389
  derived and/or modified CDS sequence (opt4) from RVA/DS-1/P[4]__ABV53252.1__VP8*(65-223)

SEQ ID NO: 391 - RNA, 477 nt, Artificial Sequence
  derived and/or modified CDS sequence (opt4) from RVA/F01322/P[6]__AFA51886.1__VP8*(65-223)
cuggacggccccuaccagcccaccaacuucaagccccccaacgacuacuggauccugcugaaccccaccaaccagcagguggugcuggagggcaccaacaagaccgacaucuggguggcccugcugcugguggagcccaacgugaccaaccagagcagacaguacacccuguucggcgagaccaagcagaucaccguggagaacaacaccaacaaguggaaguucuucgagauguucagaagcagcgugagcgccgaguuccagcacaagagaacccugaccagcgacaccaagcuggccggcuucaugaaguucuacaacagcguguggaccuuccacggcgagacccccaacgccaccaccgacuacagcagcaccagcaaccuguucgagguggagaccgugauccacguggaguucuacaucauccccagaagccaggagagcaagugcagcgaguacaucaacaccggccug

SEQ ID NO: 392 - RNA, 477 nt, Artificial Sequence
  derived and/or modified CDS sequence (opt4) from RVA/1076/P[6]__AAA47337.1__VP8*(65-223)
cuggacggccccuaccagcccaccagcuucaagccccccagcgacuacuggauccugcugaaccccaccaaccagcagguggugcuggagggcaccaacaagaccgacaucuggguggcccugcugcugguggagcccaacgugaccaaccagagcagacaguacacccuguucggcgagaccaagcagaucaccguggagaacaacaccaacaaguggaaguucuucgagauguucagaagcagcgugagcgccgaguuccagcacaagagaacccugaccagcgacaccaagcuggccggcuuccugaaguucuacaacagcguguggaccuucuacggcgagaccccccacgccaccaccgacuacagcagcaccagcaaccugagcgagguggagaccgccauccacguggaguucuacaucauccccagaagccaggagagcaagugcaacgaguacaucaacaccggccug

SEQ ID NO: 393 - RNA, 477 nt, Artificial Sequence
  derived and/or modified CDS sequence (opt4) from RVA/BE1128/P[8]__AEX30671.1__VP8*(65-223)
cuggacggccccuaccagcccaccaccuucaccccccccaccgacuacuggauccugaucaccagcaacaccaacggcgugguguacgagagcaccaacaacagcgacuucuggaccgccgugaucgccguggagccccacgugaaccccguggacagacaguacaacguguucggcgagaacaagcaguucaacgugagaaacgacagcgacaaguggaaguuccuggagauguucagaggcagcagccagaacgacuucuacaacagaagaacccugaccagcgacaccagacuggugggcauccugaaguacggcggcagaguguggaccuuccacggcgagacccccagagccaccaccgacagcagcaacaccgccaaccuggacggcaucagcaucaccauccacagcgaguucuacaucauccccagaagccaggagagcaagugcaacgaguacaucaacaacggccug

SEQ ID NO: 394 - RNA, 477 nt, Artificial Sequence
  derived and/or modified CDS sequence (opt4) from RVA/Wa-VirWa/P[8]__ACR22783.1__VP8*(65-223)
cuggacggccccuaccagcccaccaccuucaccccccccaacgacuacuggauccugaucaacagcaacaccaacggcgugguguacgagagcaccaacaacagcgacuucuggaccgccgugguggccaucgagccccacgugaaccccguggacagacaguacaccaucuucggcgagagcaagcaguucaacgugagaaacgacagcaacaaguggaaguuccuggagauguucagaagcagcagccagaacgaguucuacaacagaagaacccugaccagcgacaccagacuggugggcauccugaaguacggcggcagaguguggaccuuccacggcgagacccccagagccaccaccgacagcagcagcaccgccaaccugaacaacaucagcaucaccauccacagcgaguucuacaucauccccagaagccaggagagcaagugcaacgaguacaucaacaacggccug

SEQ ID NO: 395 - RNA, 477 nt, Artificial Sequence
  derived and/or modified CDS sequence (opt4) from RVA/Wa/P[8]__AAA47290.1__VP8*(65-223)
cuggacggccccuaccagcccaccaccuucaccccccccaacgacuacuggauccugaucaacagcaacaccaacggcgugguguacgagagcaccaacaacagcgacuucuggaccgccgugguggccaucgagccccacgugaaccccguggacagacaguacaccaucuucggcgagagcaagcaguucaacgugagcaacgacagcaacaaguggaaguuccuggagauguucagaagcagcagccagaacgaguucuacaacagaagaacccugaccagcgacaccagauucgugggcauccugaaguacggcggcagaguguggaccuuccacggcgagacccccagagccaccaccgacagcagcagcaccgccaaccugaacaacaucagcaucaccauccacagcgaguucuacaucauccccagaagccaggagagcaagugcaacgaguacaucaacaacggccug

SEQ ID NO: 396 - RNA, 477 nt, Artificial Sequence; identical to SEQ ID NO: 395
  derived and/or modified CDS sequence (opt4) from RVA/Wa/P[8]__AAA66953.1__VP8*(65-223)

SEQ ID NO: 397 - RNA, 549 nt, Artificial Sequence
  derived and/or modified CDS sequence (opt4) from RVA/BE1058/P[4]__AEX30665.1__VP8*(41-223)
gcccagaccagauacgcccccgugaacuggggccacggcgagaucaacgacagcaccaccguggagcccgugcuggacggccccuaccagcccaccaccuucaagccccccaacgacuacuggcugcugaucagcagcaacaccgacggcgugguguacgagagcaccaacaacagcgacuucuggaccgccgugaucgccguggagccccacgugaaccagaccaacagacaguacgugcuguucggcgagaacaagcaguucaacaucgagaacagcagcgacaaguggaaguucuucgagauguucaagggcaacagccagagcgacuucagcaacagaagaacccugaccagcagcaacagacuggugggcaugcugaaguacggcggcagaguguggaccuuccacggcgagacccccagagccaccaccgacagcagcagcaccgccgaccugaacaacaucagcaucaucauccacagcgaguucuacaucauccccagaagccaggagagcaagugcaacgaguacaucaacaacggccug

SEQ ID NO: 398 - RNA, 549 nt, Artificial Sequence
  derived and/or modified CDS sequence (opt4) from RVA/DS-1/P[4]__CAD62680.1__VP8*(41-223)
gcccagaccagauacgcccccgugaacuggggcagcugggagaucaacgacagcaccaccguggagcccgugcuggacggccccuaccagcccaccaccuucaagccccccaacgacuacuggcugcugaucagcagcaacaccaacggcgugguguacgagagcaccaacaacaacgacuucuggaccgccgugagcagcguggagccccacgugagccagaccaacagacaguacauccuguucggcgagaacaagcaguucaacguggagaacaacagcgacaaguggaaguucuucgagaccuucaccggcagcagccagggcaacuucagcaacagaagaacccugaccagcagcaacagacuggugggcaugcugaaguacggcggcagaguguggaccuuccacggcgagacccccagagccaccaccgacagcagcaacaccgccgaccugaacaacaucagcaucaucauccacagcgaguucuacaucauccccagaagccaggagagcaagugcaacgaguacaucaacaacggccug

SEQ ID NO: 399 - RNA, 549 nt, Artificial Sequence; identical to SEQ ID NO: 398
  derived and/or modified CDS sequence (opt4) from RVA/DS-1/P[4]__ABV53252.1__VP8*(41-223)

SEQ ID NO: 400 - RNA, 549 nt, Artificial Sequence
  derived and/or modified CDS sequence (opt4) from RVA/F01322/P[6]__AFA51886.1__VP8*(41-223)
gcccagaccaacuacgcccccgugaccuggagccacggcgaggugaacgacagcaccaccaucgagcccgugcuggacggccccuaccagcccaccaacuucaagccccccaacgacuacuggauccugcugaaccccaccaaccagcagguggugcuggagggcaccaacaagaccgacaucuggguggcccugcugcugguggagcccaacgugaccaaccagagcagacaguacacccuguucggcgagaccaagcagaucaccguggagaacaacaccaacaaguggaaguucuucgagauguucagaagcagcgugagcgccgaguuccagcacaagagaacccugaccagcgacaccaagcuggccggcuucaugaaguucuacaacagcguguggaccuuccacggcgagacccccaacgccaccaccgacuacagcagcaccagcaaccuguucgagguggagaccgugauccacguggaguucuacaucauccccagaagccaggagagcaagugcagcgaguacaucaacaccggccug

SEQ ID NO: 401 - RNA, 549 nt, Artificial Sequence
  derived and/or modified CDS sequence (opt4) from RVA/1076/P[6]__AAA47337.1__VP8*(41-223)
gcccagaccaacuacgcccccgugaccuggagccacggcgaggugaacgacagcaccaccaucgagcccgugcuggacggccccuaccagcccaccagcuucaagccccccagcgacuacuggauccugcugaaccccaccaaccagcagguggugcuggagggcaccaacaagaccgacaucuggguggcccugcugcugguggagcccaacgugaccaaccagagcagacaguacacccuguucggcgagaccaagcagaucaccguggagaacaacaccaacaaguggaaguucuucgagauguucagaagcagcgugagcgccgaguuccagcacaagagaacccugaccagcgacaccaagcuggccggcuuccugaaguucuacaacagcguguggaccuucuacggcgagaccccccacgccaccaccgacuacagcagcaccagcaaccugagcgagguggagaccgccauccacguggaguucuacaucauccccagaagccaggagagcaagugcaacgaguacaucaacaccggccug

SEQ ID NO: 402 - RNA, 549 nt, Artificial Sequence
  derived and/or modified CDS sequence (opt4) from RVA/BE1128/P[8]__AEX30671.1__VP8*(41-223)
gcccagaccagauacgcccccgugaacuggggccacggcgagaucaacgacagcaccaccguggagcccauccuggacggccccuaccagcccaccaccuucaccccccccaccgacuacuggauccugaucaccagcaacaccaacggcgugguguacgagagcaccaacaacagcgacuucuggaccgccgugaucgccguggagccccacgugaaccccguggacagacaguacaacguguucggcgagaacaagcaguucaacgugagaaacgacagcgacaaguggaaguuccuggagauguucagaggcagcagccagaacgacuucuacaacagaagaacccugaccagcgacaccagacuggugggcauccugaaguacggcggcagaguguggaccuuccacggcgagacccccagagccaccaccgacagcagcaacaccgccaaccuggacggcaucagcaucaccauccacagcgaguucuacaucauccccagaagccaggagagcaagugcaacgaguacaucaacaacggccug

SEQ ID NO: 403 - RNA, 549 nt, Artificial Sequence
  derived and/or modified CDS sequence (opt4) from RVA/Wa-VirWa/P[8]__ACR22783.1__VP8*(41-223)
gcccagaccagauacgcccccgugaacuggggccacggcgagaucaacgacagcaccaccguggagcccauccuggacggccccuaccagcccaccaccuucaccccccccaacgacuacuggauccugaucaacagcaacaccaacggcgugguguacgagagcaccaacaacagcgacuucuggaccgccgugguggccaucgagccccacgugaaccccguggacagacaguacaccaucuucggcgagagcaagcaguucaacgugagaaacgacagcaacaaguggaaguuccuggagauguucagaagcagcagccagaacgaguucuacaacagaagaacccugaccagcgacaccagacuggugggcauccugaaguacggcggcagaguguggaccuuccacggcgagacccccagagccaccaccgacagcagcagcaccgccaaccugaacaacaucagcaucaccauccacagcgaguucuacaucauccccagaagccaggagagcaagugcaacgaguacaucaacaacggccug

SEQ ID NO: 404 - RNA, 549 nt, Artificial Sequence
  derived and/or modified CDS sequence (opt4) from RVA/Wa/P[8]__AAA47290.1__VP8*(41-223)
gcccagaccagauacgcccccgugaacuggggccacggcgagaucaacgacagcaccaccguggagcccauccuggacggccccuaccagcccaccaccuucaccccccccaacgacuacuggauccugaucaacagcaacaccaacggcgugguguacgagagcaccaacaacagcgacuucuggaccgccgugguggccaucgagccccacgugaaccccguggacagacaguacaccaucuucggcgagagcaagcaguucaacgugagcaacgacagcaacaaguggaaguuccuggagauguucagaagcagcagccagaacgaguucuacaacagaagaacccugaccagcgacaccagauucgugggcauccugaaguacggcggcagaguguggaccuuccacggcgagacccccagagccaccaccgacagcagcagcaccgccaaccugaacaacaucagcaucaccauccacagcgaguucuacaucauccccagaagccaggagagcaagugcaacgaguacaucaacaacggccug

SEQ ID NO: 405 - RNA, 549 nt, Artificial Sequence
  derived and/or modified CDS sequence (opt4) from RVA/Wa/P[8]__AAA66953.1__VP8*(41-223)
gcccagaccagauacgcccccgugaacuggggccacggcgagaucaacgacagcaccaccguggagcccaugcuggacggccccuaccagcccaccaccuucaccccccccaacgacuacuggauccugaucaacagcaacaccaacggcgugguguacgagagcaccaacaacagcgacuucuggaccgccgugguggccaucgagccccacgugaaccccguggacagacaguacaccaucuucggcgagagcaagcaguucaacgugagcaacgacagcaacaaguggaaguuccuggagauguucagaagcagcagccagaacgaguucuacaacagaagaacccugaccagcgacaccagauucgugggcauccugaaguacggcggcagaguguggaccuuccacggcgagacccccagagccaccaccgacagcagcagcaccgccaaccugaacaacaucagcaucaccauccacagcgaguucuacaucauccccagaagccaggagagcaagugcaacgaguacaucaacaacggccug

SEQ ID NO: 406 - RNA, 543 nt, Artificial Sequence
  derived and/or modified CDS sequence (opt4) from RVA/BE1058/P[4]__AEX30665.1__P2_VP8*(65-223)
augcaguacaucaaggccaacagcaaguucaucggcaucaccgagcugggcagcggcagcggccuggacggccccuaccagcccaccaccuucaagccccccaacgacuacuggcugcugaucagcagcaacaccgacggcgugguguacgagagcaccaacaacagcgacuucuggaccgccgugaucgccguggagccccacgugaaccagaccaacagacaguacgugcuguucggcgagaacaagcaguucaacaucgagaacagcagcgacaaguggaaguucuucgagauguucaagggcaacagccagagcgacuucagcaacagaagaacccugaccagcagcaacagacuggugggcaugcugaaguacggcggcagaguguggaccuuccacggcgagacccccagagccaccaccgacagcagcagcaccgccgaccugaacaacaucagcaucaucauccacagcgaguucuacaucauccccagaagccaggagagcaagugcaacgaguacaucaacaacggccuguga

SEQ ID NO: 407 - RNA, 543 nt, Artificial Sequence
  derived and/or modified CDS sequence (opt4) from RVA/DS-1/P[4]__CAD62680.1__P2_VP8*(65-223)
augcaguacaucaaggccaacagcaaguucaucggcaucaccgagcugggcagcggcagcggccuggacggccccuaccagcccaccaccuucaagccccccaacgacuacuggcugcugaucagcagcaacaccaacggcgugguguacgagagcaccaacaacaacgacuucuggaccgccgugagcagcguggagccccacgugagccagaccaacagacaguacauccuguucggcgagaacaagcaguucaacguggagaacaacagcgacaaguggaaguucuucgagaccuucaccggcagcagccagggcaacuucagcaacagaagaacccugaccagcagcaacagacuggugggcaugcugaaguacggcggcagaguguggaccuuccacggcgagacccccagagccaccaccgacagcagcaacaccgccgaccugaacaacaucagcaucaucauccacagcgaguucuacaucauccccagaagccaggagagcaagugcaacgaguacaucaacaacggccuguga

SEQ ID NO: 408 - RNA, 543 nt, Artificial Sequence; identical to SEQ ID NO: 407
  derived and/or modified CDS sequence (opt4) from RVA/DS-1/P[4]__ABV53252.1__P2_VP8*(65-223)

SEQ ID NO: 409 - RNA, 543 nt, Artificial Sequence
  derived and/or modified CDS sequence (opt4) from RVA/F01322/P[6]__AFA51886.1__P2_VP8*(65-223)
augcaguacaucaaggccaacagcaaguucaucggcaucaccgagcugggcagcggcagcggccuggacggccccuaccagcccaccaacuucaagccccccaacgacuacuggauccugcugaaccccaccaaccagcagguggugcuggagggcaccaacaagaccgacaucuggguggcccugcugcugguggagcccaacgugaccaaccagagcagacaguacacccuguucggcgagaccaagcagaucaccguggagaacaacaccaacaaguggaaguucuucgagauguucagaagcagcgugagcgccgaguuccagcacaagagaacccugaccagcgacaccaagcuggccggcuucaugaaguucuacaacagcguguggaccuuccacggcgagacccccaacgccaccaccgacuacagcagcaccagcaaccuguucgagguggagaccgugauccacguggaguucuacaucauccccagaagccaggagagcaagugcagcgaguacaucaacaccggccuguga

SEQ ID NO: 410 - RNA, 543 nt, Artificial Sequence
  derived and/or modified CDS sequence (opt4) from RVA/1076/P[6]__AAA47337.1__P2_VP8*(65-223)
augcaguacaucaaggccaacagcaaguucaucggcaucaccgagcugggcagcggcagcggccuggacggccccuaccagcccaccagcuucaagccccccagcgacuacuggauccugcugaaccccaccaaccagcagguggugcuggagggcaccaacaagaccgacaucuggguggcccugcugcugguggagcccaacgugaccaaccagagcagacaguacacccuguucggcgagaccaagcagaucaccguggagaacaacaccaacaaguggaaguucuucgagauguucagaagcagcgugagcgccgaguuccagcacaagagaacccugaccagcgacaccaagcuggccggcuuccugaaguucuacaacagcguguggaccuucuacggcgagaccccccacgccaccaccgacuacagcagcaccagcaaccugagcgagguggagaccgccauccacguggaguucuacaucauccccagaagccaggagagcaagugcaacgaguacaucaacaccggccuguga

SEQ ID NO: 411 - RNA, 543 nt, Artificial Sequence
  derived and/or modified CDS sequence (opt4) from RVA/BE1128/P[8]__AEX30671.1__P2_VP8*(65-223)
augcaguacaucaaggccaacagcaaguucaucggcaucaccgagcugggcagcggcagcggccuggacggccccuaccagcccaccaccuucaccccccccaccgacuacuggauccugaucaccagcaacaccaacggcgugguguacgagagcaccaacaacagcgacuucuggaccgccgugaucgccguggagccccacgugaaccccguggacagacaguacaacguguucggcgagaacaagcaguucaacgugagaaacgacagcgacaaguggaaguuccuggagauguucagaggcagcagccagaacgacuucuacaacagaagaacccugaccagcgacaccagacuggugggcauccugaaguacggcggcagaguguggaccuuccacggcgagacccccagagccaccaccgacagcagcaacaccgccaaccuggacggcaucagcaucaccauccacagcgaguucuacaucauccccagaagccaggagagcaagugcaacgaguacaucaacaacggccuguga

SEQ ID NO: 412 - RNA, 543 nt, Artificial Sequence
  derived and/or modified CDS sequence (opt4) from RVA/Wa-VirWa/P[8]__ACR22783.1__P2_VP8*(65-223)
augcaguacaucaaggccaacagcaaguucaucggcaucaccgagcugggcagcggcagcggccuggacggccccuaccagcccaccaccuucaccccccccaacgacuacuggauccugaucaacagcaacaccaacggcgugguguacgagagcaccaacaacagcgacuucuggaccgccgugguggccaucgagccccacgugaaccccguggacagacaguacaccaucuucggcgagagcaagcaguucaacgugagaaacgacagcaacaaguggaaguuccuggagauguucagaagcagcagccagaacgaguucuacaacagaagaacccugaccagcgacaccagacuggugggcauccugaaguacggcggcagaguguggaccuuccacggcgagacccccagagccaccaccgacagcagcagcaccgccaaccugaacaacaucagcaucaccauccacagcgaguucuacaucauccccagaagccaggagagcaagugcaacgaguacaucaacaacggccuguga

SEQ ID NO: 413 - RNA, 543 nt, Artificial Sequence
  derived and/or modified CDS sequence (opt4) from RVA/Wa/P[8]__AAA47290.1__P2_VP8*(65-223)
augcaguacaucaaggccaacagcaaguucaucggcaucaccgagcugggcagcggcagcggccuggacggccccuaccagcccaccaccuucaccccccccaacgacuacuggauccugaucaacagcaacaccaacggcgugguguacgagagcaccaacaacagcgacuucuggaccgccgugguggccaucgagccccacgugaaccccguggacagacaguacaccaucuucggcgagagcaagcaguucaacgugagcaacgacagcaacaaguggaaguuccuggagauguucagaagcagcagccagaacgaguucuacaacagaagaacccugaccagcgacaccagauucgugggcauccugaaguacggcggcagaguguggaccuuccacggcgagacccccagagccaccaccgacagcagcagcaccgccaaccugaacaacaucagcaucaccauccacagcgaguucuacaucauccccagaagccaggagagcaagugcaacgaguacaucaacaacggccuguga

SEQ ID NO: 414 - RNA, 543 nt, Artificial Sequence; identical to SEQ ID NO: 413
  derived and/or modified CDS sequence (opt4) from RVA/Wa/P[8]__AAA66953.1__P2_VP8*(65-223)

SEQ ID NO: 415 - RNA, 615 nt, Artificial Sequence
  derived and/or modified CDS sequence (opt4) from RVA/BE1058/P[4]__AEX30665.1__P2_VP8*(41-223)
augcaguacaucaaggccaacagcaaguucaucggcaucaccgagcugggcagcggcagcggcgcccagaccagauacgcccccgugaacuggggccacggcgagaucaacgacagcaccaccguggagcccgugcuggacggccccuaccagcccaccaccuucaagccccccaacgacuacuggcugcugaucagcagcaacaccgacggcgugguguacgagagcaccaacaacagcgacuucuggaccgccgugaucgccguggagccccacgugaaccagaccaacagacaguacgugcuguucggcgagaacaagcaguucaacaucgagaacagcagcgacaaguggaaguucuucgagauguucaagggcaacagccagagcgacuucagcaacagaagaacccugaccagcagcaacagacuggugggcaugcugaaguacggcggcagaguguggaccuuccacggcgagacccccagagccaccaccgacagcagcagcaccgccgaccugaacaacaucagcaucaucauccacagcgaguucuacaucauccccagaagccaggagagcaagugcaacgaguacaucaacaacggccuguga

SEQ ID NO: 416 - RNA, 615 nt, Artificial Sequence
  derived and/or modified CDS sequence (opt4) from RVA/DS-1/P[4]__CAD62680.1__P2_VP8*(41-223)
augcaguacaucaaggccaacagcaaguucaucggcaucaccgagcugggcagcggcagcggcgcccagaccagauacgcccccgugaacuggggcagcugggagaucaacgacagcaccaccguggagcccgugcuggacggccccuaccagcccaccaccuucaagccccccaacgacuacuggcugcugaucagcagcaacaccaacggcgugguguacgagagcaccaacaacaacgacuucuggaccgccgugagcagcguggagccccacgugagccagaccaacagacaguacauccuguucggcgagaacaagcaguucaacguggagaacaacagcgacaaguggaaguucuucgagaccuucaccggcagcagccagggcaacuucagcaacagaagaacccugaccagcagcaacagacuggugggcaugcugaaguacggcggcagaguguggaccuuccacggcgagacccccagagccaccaccgacagcagcaacaccgccgaccugaacaacaucagcaucaucauccacagcgaguucuacaucauccccagaagccaggagagcaagugcaacgaguacaucaacaacggccuguga

SEQ ID NO: 417 - RNA, 615 nt, Artificial Sequence; identical to SEQ ID NO: 416
  derived and/or modified CDS sequence (opt4) from RVA/DS-1/P[4]__ABV53252.1__P2_VP8*(41-223)

SEQ ID NO: 418 - RNA, 615 nt, Artificial Sequence
  derived and/or modified CDS sequence (opt4) from RVA/F01322/P[6]__AFA51886.1__P2_VP8*(41-223)
augcaguacaucaaggccaacagcaaguucaucggcaucaccgagcugggcagcggcagcggcgcccagaccaacuacgcccccgugaccuggagccacggcgaggugaacgacagcaccaccaucgagcccgugcuggacggccccuaccagcccaccaacuucaagccccccaacgacuacuggauccugcugaaccccaccaaccagcagguggugcuggagggcaccaacaagaccgacaucuggguggcccugcugcugguggagcccaacgugaccaaccagagcagacaguacacccuguucggcgagaccaagcagaucaccguggagaacaacaccaacaaguggaaguucuucgagauguucagaagcagcgugagcgccgaguuccagcacaagagaacccugaccagcgacaccaagcuggccggcuucaugaaguucuacaacagcguguggaccuuccacggcgagacccccaacgccaccaccgacuacagcagcaccagcaaccuguucgagguggagaccgugauccacguggaguucuacaucauccccagaagccaggagagcaagugcagcgaguacaucaacaccggccuguga

SEQ ID NO: 419 - RNA, 615 nt, Artificial Sequence
  derived and/or modified CDS sequence (opt4) from RVA/1076/P[6]__AAA47337.1__P2_VP8*(41-223)
augcaguacaucaaggccaacagcaaguucaucggcaucaccgagcugggcagcggcagcggcgcccagaccaacuacgcccccgugaccuggagccacggcgaggugaacgacagcaccaccaucgagcccgugcuggacggccccuaccagcccaccagcuucaagccccccagcgacuacuggauccugcugaaccccaccaaccagcagguggugcuggagggcaccaacaagaccgacaucuggguggcccugcugcugguggagcccaacgugaccaaccagagcagacaguacacccuguucggcgagaccaagcagaucaccguggagaacaacaccaacaaguggaaguucuucgagauguucagaagcagcgugagcgccgaguuccagcacaagagaacccugaccagcgacaccaagcuggccggcuuccugaaguucuacaacagcguguggaccuucuacggcgagaccccccacgccaccaccgacuacagcagcaccagcaaccugagcgagguggagaccgccauccacguggaguucuacaucauccccagaagccaggagagcaagugcaacgaguacaucaacaccggccuguga

SEQ ID NO: 420 - RNA, 615 nt, Artificial Sequence
  derived and/or modified CDS sequence (opt4) from RVA/BE1128/P[8]__AEX30671.1__P2_VP8*(41-223)
augcaguacaucaaggccaacagcaaguucaucggcaucaccgagcugggcagcggcagcggcgcccagaccagauacgcccccgugaacuggggccacggcgagaucaacgacagcaccaccguggagcccauccuggacggccccuaccagcccaccaccuucaccccccccaccgacuacuggauccugaucaccagcaacaccaacggcgugguguacgagagcaccaacaacagcgacuucuggaccgccgugaucgccguggagccccacgugaaccccguggacagacaguacaacguguucggcgagaacaagcaguucaacgugagaaacgacagcgacaaguggaaguuccuggagauguucagaggcagcagccagaacgacuucuacaacagaagaacccugaccagcgacaccagacuggugggcauccugaaguacggcggcagaguguggaccuuccacggcgagacccccagagccaccaccgacagcagcaacaccgccaaccuggacggcaucagcaucaccauccacagcgaguucuacaucauccccagaagccaggagagcaagugcaacgaguacaucaacaacggccuguga

SEQ ID NO: 421 - RNA, 615 nt, Artificial Sequence
  derived and/or modified CDS sequence (opt4) from RVA/Wa-VirWa/P[8]__ACR22783.1__P2_VP8*(41-223)
augcaguacaucaaggccaacagcaaguucaucggcaucaccgagcugggcagcggcagcggcgcccagaccagauacgcccccgugaacuggggccacggcgagaucaacgacagcaccaccguggagcccauccuggacggccccuaccagcccaccaccuucaccccccccaacgacuacuggauccugaucaacagcaacaccaacggcgugguguacgagagcaccaacaacagcgacuucuggaccgccgugguggccaucgagccccacgugaaccccguggacagacaguacaccaucuucggcgagagcaagcaguucaacgugagaaacgacagcaacaaguggaaguuccuggagauguucagaagcagcagccagaacgaguucuacaacagaagaacccugaccagcgacaccagacuggugggcauccugaaguacggcggcagaguguggaccuuccacggcgagacccccagagccaccaccgacagcagcagcaccgccaaccugaacaacaucagcaucaccauccacagcgaguucuacaucauccccagaagccaggagagcaagugcaacgaguacaucaacaacggccuguga

SEQ ID NO: 422 - RNA, 615 nt, Artificial Sequence
  derived and/or modified CDS sequence (opt4) from RVA/Wa/P[8]__AAA47290.1__P2_VP8*(41-223)
augcaguacaucaaggccaacagcaaguucaucggcaucaccgagcugggcagcggcagcggcgcccagaccagauacgcccccgugaacuggggccacggcgagaucaacgacagcaccaccguggagcccauccuggacggccccuaccagcccaccaccuucaccccccccaacgacuacuggauccugaucaacagcaacaccaacggcgugguguacgagagcaccaacaacagcgacuucuggaccgccgugguggccaucgagccccacgugaaccccguggacagacaguacaccaucuucggcgagagcaagcaguucaacgugagcaacgacagcaacaaguggaaguuccuggagauguucagaagcagcagccagaacgaguucuacaacagaagaacccugaccagcgacaccagauucgugggcauccugaaguacggcggcagaguguggaccuuccacggcgagacccccagagccaccaccgacagcagcagcaccgccaaccugaacaacaucagcaucaccauccacagcgaguucuacaucauccccagaagccaggagagcaagugcaacgaguacaucaacaacggccuguga

SEQ ID NO: 423 - RNA, 615 nt, Artificial Sequence
  derived and/or modified CDS sequence (opt4) from RVA/Wa/P[8]__AAA66953.1__P2_VP8*(41-223)
augcaguacaucaaggccaacagcaaguucaucggcaucaccgagcugggcagcggcagcggcgcccagaccagauacgcccccgugaacuggggccacggcgagaucaacgacagcaccaccguggagcccaugcuggacggccccuaccagcccaccaccuucaccccccccaacgacuacuggauccugaucaacagcaacaccaacggcgugguguacgagagcaccaacaacagcgacuucuggaccgccgugguggccaucgagccccacgugaaccccguggacagacaguacaccaucuucggcgagagcaagcaguucaacgugagcaacgacagcaacaaguggaaguuccuggagauguucagaagcagcagccagaacgaguucuacaacagaagaacccugaccagcgacaccagauucgugggcauccugaaguacggcggcagaguguggaccuuccacggcgagacccccagagccaccaccgacagcagcagcaccgccaaccugaacaacaucagcaucaccauccacagcgaguucuacaucauccccagaagccaggagagcaagugcaacgaguacaucaacaacggccuguga

SEQ ID NO: 424 - RNA, 1041 nt, Artificial Sequence
  derived and/or modified CDS sequence (opt4) from RVA/BE1058/P[4]__AEX30665.1__P2_VP8*(65-223)_Ferritin
augcaguacaucaaggccaacagcaaguucaucggcaucaccgagcugggcagcggcagcggccuggacggccccuaccagcccaccaccuucaagccccccaacgacuacuggcugcugaucagcagcaacaccgacggcgugguguacgagagcaccaacaacagcgacuucuggaccgccgugaucgccguggagccccacgugaaccagaccaacagacaguacgugcuguucggcgagaacaagcaguucaacaucgagaacagcagcgacaaguggaaguucuucgagauguucaagggcaacagccagagcgacuucagcaacagaagaacccugaccagcagcaacagacuggugggcaugcugaaguacggcggcagaguguggaccuuccacggcgagacccccagagccaccaccgacagcagcagcaccgccgaccugaacaacaucagcaucaucauccacagcgaguucuacaucauccccagaagccaggagagcaagugcaacgaguacaucaacaacggccugagcggcggcgacaucaucaagcugcugaacgagcaggugaacaaggagaugcagagcagcaaccuguacaugagcaugagcagcuggugcuacacccacagccuggacggcgccggccuguuccuguucgaccacgccgccgaggaguacgagcacgccaagaagcugaucaucuuccugaacgagaacaacgugcccgugcagcugaccagcaucagcgcccccgagcacaaguucgagggccugacccagaucuuccagaaggccuacgagcacgagcagcacaucagcgagagcaucaacaacaucguggaccacgccaucaagagcaaggaccacgccaccuucaacuuccugcagugguacguggccgagcagcacgaggaggaggugcuguucaaggacauccuggacaagaucgagcugaucggcaacgagaaccacggccuguaccuggccgaccaguacgugaagggcaucgccaagagcagaaagagcuga

SEQ ID NO: 425 - RNA, 1041 nt, Artificial Sequence
  derived and/or modified CDS sequence (opt4) from RVA/DS-1/P[4]__CAD62680.1__P2_VP8*(65-223)_Ferritin
augcaguacaucaaggccaacagcaaguucaucggcaucaccgagcugggcagcggcagcggccuggacggccccuaccagcccaccaccuucaagccccccaacgacuacuggcugcugaucagcagcaacaccaacggcgugguguacgagagcaccaacaacaacgacuucuggaccgccgugagcagcguggagccccacgugagccagaccaacagacaguacauccuguucggcgagaacaagcaguucaacguggagaacaacagcgacaaguggaaguucuucgagaccuucaccggcagcagccagggcaacuucagcaacagaagaacccugaccagcagcaacagacuggugggcaugcugaaguacggcggcagaguguggaccuuccacggcgagacccccagagccaccaccgacagcagcaacaccgccgaccugaacaacaucagcaucaucauccacagcgaguucuacaucauccccagaagccaggagagcaagugcaacgaguacaucaacaacggccugagcggcggcgacaucaucaagcugcugaacgagcaggugaacaaggagaugcagagcagcaaccuguacaugagcaugagcagcuggugcuacacccacagccuggacggcgccggccuguuccuguucgaccacgccgccgaggaguacgagcacgccaagaagcugaucaucuuccugaacgagaacaacgugcccgugcagcugaccagcaucagcgcccccgagcacaaguucgagggccugacccagaucuuccagaaggccuacgagcacgagcagcacaucagcgagagcaucaacaacaucguggaccacgccaucaagagcaaggaccacgccaccuucaacuuccugcagugguacguggccgagcagcacgaggaggaggugcuguucaaggacauccuggacaagaucgagcugaucggcaacgagaaccacggccuguaccuggccgaccaguacgugaagggcaucgccaagagcagaaagagcuga

SEQ ID NO: 426 - RNA, 1041 nt, Artificial Sequence; identical to SEQ ID NO: 425
  derived and/or modified CDS sequence (opt4) from RVA/DS-1/P[4]__ABV53252.1__P2_VP8*(65-223)_Ferritin

SEQ ID NO: 427 - RNA, 1041 nt, Artificial Sequence
  derived and/or modified CDS sequence (opt4) from RVA/F01322/P[6]__AFA51886.1__P2_VP8*(65-223)_Ferritin
augcaguacaucaaggccaacagcaaguucaucggcaucaccgagcugggcagcggcagcggccuggacggccccuaccagcccaccaacuucaagccccccaacgacuacuggauccugcugaaccccaccaaccagcagguggugcuggagggcaccaacaagaccgacaucuggguggcccugcugcugguggagcccaacgugaccaaccagagcagacaguacacccuguucggcgagaccaagcagaucaccguggagaacaacaccaacaaguggaaguucuucgagauguucagaagcagcgugagcgccgaguuccagcacaagagaacccugaccagcgacaccaagcuggccggcuucaugaaguucuacaacagcguguggaccuuccacggcgagacccccaacgccaccaccgacuacagcagcaccagcaaccuguucgagguggagaccgugauccacguggaguucuacaucauccccagaagccaggagagcaagugcagcgaguacaucaacaccggccugagcggcggcgacaucaucaagcugcugaacgagcaggugaacaaggagaugcagagcagcaaccuguacaugagcaugagcagcuggugcuacacccacagccuggacggcgccggccuguuccuguucgaccacgccgccgaggaguacgagcacgccaagaagcugaucaucuuccugaacgagaacaacgugcccgugcagcugaccagcaucagcgcccccgagcacaaguucgagggccugacccagaucuuccagaaggccuacgagcacgagcagcacaucagcgagagcaucaacaacaucguggaccacgccaucaagagcaaggaccacgccaccuucaacuuccugcagugguacguggccgagcagcacgaggaggaggugcuguucaaggacauccuggacaagaucgagcugaucggcaacgagaaccacggccuguaccuggccgaccaguacgugaagggcaucgccaagagcagaaagagcuga

SEQ ID NO: 428 - RNA, 1041 nt, Artificial Sequence
  derived and/or modified CDS sequence (opt4) from RVA/1076/P[6]__AAA47337.1__P2_VP8*(65-223)_Ferritin
augcaguacaucaaggccaacagcaaguucaucggcaucaccgagcugggcagcggcagcggccuggacggccccuaccagcccaccagcuucaagccccccagcgacuacuggauccugcugaaccccaccaaccagcagguggugcuggagggcaccaacaagaccgacaucuggguggcccugcugcugguggagcccaacgugaccaaccagagcagacaguacacccuguucggcgagaccaagcagaucaccguggagaacaacaccaacaaguggaaguucuucgagauguucagaagcagcgugagcgccgaguuccagcacaagagaacccugaccagcgacaccaagcuggccggcuuccugaaguucuacaacagcguguggaccuucuacggcgagaccccccacgccaccaccgacuacagcagcaccagcaaccugagcgagguggagaccgccauccacguggaguucuacaucauccccagaagccaggagagcaagugcaacgaguacaucaacaccggccugagcggcggcgacaucaucaagcugcugaacgagcaggugaacaaggagaugcagagcagcaaccuguacaugagcaugagcagcuggugcuacacccacagccuggacggcgccggccuguuccuguucgaccacgccgccgaggaguacgagcacgccaagaagcugaucaucuuccugaacgagaacaacgugcccgugcagcugaccagcaucagcgcccccgagcacaaguucgagggccugacccagaucuuccagaaggccuacgagcacgagcagcacaucagcgagagcaucaacaacaucguggaccacgccaucaagagcaaggaccacgccaccuucaacuuccugcagugguacguggccgagcagcacgaggaggaggugcuguucaaggacauccuggacaagaucgagcugaucggcaacgagaaccacggccuguaccuggccgaccaguacgugaagggcaucgccaagagcagaaagagcuga

SEQ ID NO: 429 - RNA, 1041 nt, Artificial Sequence
  derived and/or modified CDS sequence (opt4) from RVA/BE1128/P[8]__AEX30671.1__P2_VP8*(65-223)_Ferritin
augcaguacaucaaggccaacagcaaguucaucggcaucaccgagcugggcagcggcagcggccuggacggccccuaccagcccaccaccuucaccccccccaccgacuacuggauccugaucaccagcaacaccaacggcgugguguacgagagcaccaacaacagcgacuucuggaccgccgugaucgccguggagccccacgugaaccccguggacagacaguacaacguguucggcgagaacaagcaguucaacgugagaaacgacagcgacaaguggaaguuccuggagauguucagaggcagcagccagaacgacuucuacaacagaagaacccugaccagcgacaccagacuggugggcauccugaaguacggcggcagaguguggaccuuccacggcgagacccccagagccaccaccgacagcagcaacaccgccaaccuggacggcaucagcaucaccauccacagcgaguucuacaucauccccagaagccaggagagcaagugcaacgaguacaucaacaacggccugagcggcggcgacaucaucaagcugcugaacgagcaggugaacaaggagaugcagagcagcaaccuguacaugagcaugagcagcuggugcuacacccacagccuggacggcgccggccuguuccuguucgaccacgccgccgaggaguacgagcacgccaagaagcugaucaucuuccugaacgagaacaacgugcccgugcagcugaccagcaucagcgcccccgagcacaaguucgagggccugacccagaucuuccagaaggccuacgagcacgagcagcacaucagcgagagcaucaacaacaucguggaccacgccaucaagagcaaggaccacgccaccuucaacuuccugcagugguacguggccgagcagcacgaggaggaggugcuguucaaggacauccuggacaagaucgagcugaucggcaacgagaaccacggccuguaccuggccgaccaguacgugaagggcaucgccaagagcagaaagagcuga

SEQ ID NO: 430 - RNA, 1041 nt, Artificial Sequence
  derived and/or modified CDS sequence (opt4) from RVA/Wa-VirWa/P[8]__ACR22783.1__P2_VP8*(65-223)_Ferritin
augcaguacaucaaggccaacagcaaguucaucggcaucaccgagcugggcagcggcagcggccuggacggccccuaccagcccaccaccuucaccccccccaacgacuacuggauccugaucaacagcaacaccaacggcgugguguacgagagcaccaacaacagcgacuucuggaccgccgugguggccaucgagccccacgugaaccccguggacagacaguacaccaucuucggcgagagcaagcaguucaacgugagaaacgacagcaacaaguggaaguuccuggagauguucagaagcagcagccagaacgaguucuacaacagaagaacccugaccagcgacaccagacuggugggcauccugaaguacggcggcagaguguggaccuuccacggcgagacccccagagccaccaccgacagcagcagcaccgccaaccugaacaacaucagcaucaccauccacagcgaguucuacaucauccccagaagccaggagagcaagugcaacgaguacaucaacaacggccugagcggcggcgacaucaucaagcugcugaacgagcaggugaacaaggagaugcagagcagcaaccuguacaugagcaugagcagcuggugcuacacccacagccuggacggcgccggccuguuccuguucgaccacgccgccgaggaguacgagcacgccaagaagcugaucaucuuccugaacgagaacaacgugcccgugcagcugaccagcaucagcgcccccgagcacaaguucgagggccugacccagaucuuccagaaggccuacgagcacgagcagcacaucagcgagagcaucaacaacaucguggaccacgccaucaagagcaaggaccacgccaccuucaacuuccugcagugguacguggccgagcagcacgaggaggaggugcuguucaaggacauccuggacaagaucgagcugaucggcaacgagaaccacggccuguaccuggccgaccaguacgugaagggcaucgccaagagcagaaagagcuga

SEQ ID NO: 431 - RNA, 1041 nt, Artificial Sequence
  derived and/or modified CDS sequence (opt4) from RVA/Wa/P[8]__AAA47290.1__P2_VP8*(65-223)_Ferritin
augcaguacaucaaggccaacagcaaguucaucggcaucaccgagcugggcagcggcagcggccuggacggccccuaccagcccaccaccuucaccccccccaacgacuacuggauccugaucaacagcaacaccaacggcgugguguacgagagcaccaacaacagcgacuucuggaccgccgugguggccaucgagccccacgugaaccccguggacagacaguacaccaucuucggcgagagcaagcaguucaacgugagcaacgacagcaacaaguggaaguuccuggagauguucagaagcagcagccagaacgaguucuacaacagaagaacccugaccagcgacaccagauucgugggcauccugaaguacggcggcagaguguggaccuuccacggcgagacccccagagccaccaccgacagcagcagcaccgccaaccugaacaacaucagcaucaccauccacagcgaguucuacaucauccccagaagccaggagagcaagugcaacgaguacaucaacaacggccugagcggcggcgacaucaucaagcugcugaacgagcaggugaacaaggagaugcagagcagcaaccuguacaugagcaugagcagcuggugcuacacccacagccuggacggcgccggccuguuccuguucgaccacgccgccgaggaguacgagcacgccaagaagcugaucaucuuccugaacgagaacaacgugcccgugcagcugaccagcaucagcgcccccgagcacaaguucgagggccugacccagaucuuccagaaggccuacgagcacgagcagcacaucagcgagagcaucaacaacaucguggaccacgccaucaagagcaaggaccacgccaccuucaacuuccugcagugguacguggccgagcagcacgaggaggaggugcuguucaaggacauccuggacaagaucgagcugaucggcaacgagaaccacggccuguaccuggccgaccaguacgugaagggcaucgccaagagcagaaagagcuga

SEQ ID NO: 432 - RNA, 1041 nt, Artificial Sequence; identical to SEQ ID NO: 431
  derived and/or modified CDS sequence (opt4) from RVA/Wa/P[8]__AAA66953.1__P2_VP8*(65-223)_Ferritin

SEQ ID NO: 433 - RNA, 1113 nt, Artificial Sequence
  derived and/or modified CDS sequence (opt4) from RVA/BE1058/P[4]__AEX30665.1__P2_VP8*(41-223)_Ferritin
augcaguacaucaaggccaacagcaaguucaucggcaucaccgagcugggcagcggcagcggcgcccagaccagauacgcccccgugaacuggggccacggcgagaucaacgacagcaccaccguggagcccgugcuggacggccccuaccagcccaccaccuucaagccccccaacgacuacuggcugcugaucagcagcaacaccgacggcgugguguacgagagcaccaacaacagcgacuucuggaccgccgugaucgccguggagccccacgugaaccagaccaacagacaguacgugcuguucggcgagaacaagcaguucaacaucgagaacagcagcgacaaguggaaguucuucgagauguucaagggcaacagccagagcgacuucagcaacagaagaacccugaccagcagcaacagacuggugggcaugcugaaguacggcggcagaguguggaccuuccacggcgagacccccagagccaccaccgacagcagcagcaccgccgaccugaacaacaucagcaucaucauccacagcgaguucuacaucauccccagaagccaggagagcaagugcaacgaguacaucaacaacggccugagcggcggcgacaucaucaagcugcugaacgagcaggugaacaaggagaugcagagcagcaaccuguacaugagcaugagcagcuggugcuacacccacagccuggacggcgccggccuguuccuguucgaccacgccgccgaggaguacgagcacgccaagaagcugaucaucuuccugaacgagaacaacgugcccgugcagcugaccagcaucagcgcccccgagcacaaguucgagggccugacccagaucuuccagaaggccuacgagcacgagcagcacaucagcgagagcaucaacaacaucguggaccacgccaucaagagcaaggaccacgccaccuucaacuuccugcagugguacguggccgagcagcacgaggaggaggugcuguucaaggacauccuggacaagaucgagcugaucggcaacgagaaccacggccuguaccuggccgaccaguacgugaagggcaucgccaagagcagaaagagcuga

SEQ ID NO: 434 - RNA, 1113 nt, Artificial Sequence
  derived and/or modified CDS sequence (opt4) from RVA/DS-1/P[4]__CAD62680.1__P2_VP8*(41-223)_Ferritin
augcaguacaucaaggccaacagcaaguucaucggcaucaccgagcugggcagcggcagcggcgcccagaccagauacgcccccgugaacuggggcagcugggagaucaacgacagcaccaccguggagcccgugcuggacggccccuaccagcccaccaccuucaagccccccaacgacuacuggcugcugaucagcagcaacaccaacggcgugguguacgagagcaccaacaacaacgacuucuggaccgccgugagcagcguggagccccacgugagccagaccaacagacaguacauccuguucggcgagaacaagcaguucaacguggagaacaacagcgacaaguggaaguucuucgagaccuucaccggcagcagccagggcaacuucagcaacagaagaacccugaccagcagcaacagacuggugggcaugcugaaguacggcggcagaguguggaccuuccacggcgagacccccagagccaccaccgacagcagcaacaccgccgaccugaacaacaucagcaucaucauccacagcgaguucuacaucauccccagaagccaggagagcaagugcaacgaguacaucaacaacggccugagcggcggcgacaucaucaagcugcugaacgagcaggugaacaaggagaugcagagcagcaaccuguacaugagcaugagcagcuggugcuacacccacagccuggacggcgccggccuguuccuguucgaccacgccgccgaggaguacgagcacgccaagaagcugaucaucuuccugaacgagaacaacgugcccgugcagcugaccagcaucagcgcccccgagcacaaguucgagggccugacccagaucuuccagaaggccuacgagcacgagcagcacaucagcgagagcaucaacaacaucguggaccacgccaucaagagcaaggaccacgccaccuucaacuuccugcagugguacguggccgagcagcacgaggaggaggugcuguucaaggacauccuggacaagaucgagcugaucggcaacgagaaccacggccuguaccuggccgaccaguacgugaagggcaucgccaagagcagaaagagcuga

SEQ ID NO: 435 - RNA, 1113 nt, Artificial Sequence; identical to SEQ ID NO: 434
  derived and/or modified CDS sequence (opt4) from RVA/DS-1/P[4]__ABV53252.1__P2_VP8*(41-223)_Ferritin

SEQ ID NO: 436 - RNA, 1113 nt, Artificial Sequence
  derived and/or modified CDS sequence (opt4) from RVA/F01322/P[6]__AFA51886.1__P2_VP8*(41-223)_Ferritin
augcaguacaucaaggccaacagcaaguucaucggcaucaccgagcugggcagcggcagcggcgcccagaccaacuacgcccccgugaccuggagccacggcgaggugaacgacagcaccaccaucgagcccgugcuggacggccccuaccagcccaccaacuucaagccccccaacgacuacuggauccugcugaaccccaccaaccagcagguggugcuggagggcaccaacaagaccgacaucuggguggcccugcugcugguggagcccaacgugaccaaccagagcagacaguacacccuguucggcgagaccaagcagaucaccguggagaacaacaccaacaaguggaaguucuucgagauguucagaagcagcgugagcgccgaguuccagcacaagagaacccugaccagcgacaccaagcuggccggcuucaugaaguucuacaacagcguguggaccuuccacggcgagacccccaacgccaccaccgacuacagcagcaccagcaaccuguucgagguggagaccgugauccacguggaguucuacaucauccccagaagccaggagagcaagugcagcgaguacaucaacaccggccugagcggcggcgacaucaucaagcugcugaacgagcaggugaacaaggagaugcagagcagcaaccuguacaugagcaugagcagcuggugcuacacccacagccuggacggcgccggccuguuccuguucgaccacgccgccgaggaguacgagcacgccaagaagcugaucaucuuccugaacgagaacaacgugcccgugcagcugaccagcaucagcgcccccgagcacaaguucgagggccugacccagaucuuccagaaggccuacgagcacgagcagcacaucagcgagagcaucaacaacaucguggaccacgccaucaagagcaaggaccacgccaccuucaacuuccugcagugguacguggccgagcagcacgaggaggaggugcuguucaaggacauccuggacaagaucgagcugaucggcaacgagaaccacggccuguaccuggccgaccaguacgugaagggcaucgccaagagcagaaagagcuga

SEQ ID NO: 437 - RNA, 1113 nt, Artificial Sequence
  derived and/or modified CDS sequence (opt4) from RVA/1076/P[6]__AAA47337.1__P2_VP8*(41-223)_Ferritin
augcaguacaucaaggccaacagcaaguucaucggcaucaccgagcugggcagcggcagcggcgcccagaccaacuacgcccccgugaccuggagccacggcgaggugaacgacagcaccaccaucgagcccgugcuggacggccccuaccagcccaccagcuucaagccccccagcgacuacuggauccugcugaaccccaccaaccagcagguggugcuggagggcaccaacaagaccgacaucuggguggcccugcugcugguggagcccaacgugaccaaccagagcagacaguacacccuguucggcgagaccaagcagaucaccguggagaacaacaccaacaaguggaaguucuucgagauguucagaagcagcgugagcgccgaguuccagcacaagagaacccugaccagcgacaccaagcuggccggcuuccugaaguucuacaacagcguguggaccuucuacggcgagaccccccacgccaccaccgacuacagcagcaccagcaaccugagcgagguggagaccgccauccacguggaguucuacaucauccccagaagccaggagagcaagugcaacgaguacaucaacaccggccugagcggcggcgacaucaucaagcugcugaacgagcaggugaacaaggagaugcagagcagcaaccuguacaugagcaugagcagcuggugcuacacccacagccuggacggcgccggccuguuccuguucgaccacgccgccgaggaguacgagcacgccaagaagcugaucaucuuccugaacgagaacaacgugcccgugcagcugaccagcaucagcgcccccgagcacaaguucgagggccugacccagaucuuccagaaggccuacgagcacgagcagcacaucagcgagagcaucaacaacaucguggaccacgccaucaagagcaaggaccacgccaccuucaacuuccugcagugguacguggccgagcagcacgaggaggaggugcuguucaaggacauccuggacaagaucgagcugaucggcaacgagaaccacggccuguaccuggccgaccaguacgugaagggcaucgccaagagcagaaagagcuga

SEQ ID NO: 438 - RNA, 1113 nt, Artificial Sequence
  derived and/or modified CDS sequence (opt4) from RVA/BE1128/P[8]__AEX30671.1__P2_VP8*(41-223)_Ferritin
augcaguacaucaaggccaacagcaaguucaucggcaucaccgagcugggcagcggcagcggcgcccagaccagauacgcccccgugaacuggggccacggcgagaucaacgacagcaccaccguggagcccauccuggacggccccuaccagcccaccaccuucaccccccccaccgacuacuggauccugaucaccagcaacaccaacggcgugguguacgagagcaccaacaacagcgacuucuggaccgccgugaucgccguggagccccacgugaaccccguggacagacaguacaacguguucggcgagaacaagcaguucaacgugagaaacgacagcgacaaguggaaguuccuggagauguucagaggcagcagccagaacgacuucuacaacagaagaacccugaccagcgacaccagacuggugggcauccugaaguacggcggcagaguguggaccuuccacggcgagacccccagagccaccaccgacagcagcaacaccgccaaccuggacggcaucagcaucaccauccacagcgaguucuacaucauccccagaagccaggagagcaagugcaacgaguacaucaacaacggccugagcggcggcgacaucaucaagcugcugaacgagcaggugaacaaggagaugcagagcagcaaccuguacaugagcaugagcagcuggugcuacacccacagccuggacggcgccggccuguuccuguucgaccacgccgccgaggaguacgagcacgccaagaagcugaucaucuuccugaacgagaacaacgugcccgugcagcugaccagcaucagcgcccccgagcacaaguucgagggccugacccagaucuuccagaaggccuacgagcacgagcagcacaucagcgagagcaucaacaacaucguggaccacgccaucaagagcaaggaccacgccaccuucaacuuccugcagugguacguggccgagcagcacgaggaggaggugcuguucaaggacauccuggacaagaucgagcugaucggcaacgagaaccacggccuguaccuggccgaccaguacgugaagggcaucgccaagagcagaaagagcuga

SEQ ID NO: 439 - RNA, 1113 nt, Artificial Sequence
  derived and/or modified CDS sequence (opt4) from RVA/Wa-VirWa/P[8]__ACR22783.1__P2_VP8*(41-223)_Ferritin
augcaguacaucaaggccaacagcaaguucaucggcaucaccgagcugggcagcggcagcggcgcccagaccagauacgcccccgugaacuggggccacggcgagaucaacgacagcaccaccguggagcccauccuggacggccccuaccagcccaccaccuucaccccccccaacgacuacuggauccugaucaacagcaacaccaacggcgugguguacgagagcaccaacaacagcgacuucuggaccgccgugguggccaucgagccccacgugaaccccguggacagacaguacaccaucuucggcgagagcaagcaguucaacgugagaaacgacagcaacaaguggaaguuccuggagauguucagaagcagcagccagaacgaguucuacaacagaagaacccugaccagcgacaccagacuggugggcauccugaaguacggcggcagaguguggaccuuccacggcgagacccccagagccaccaccgacagcagcagcaccgccaaccugaacaacaucagcaucaccauccacagcgaguucuacaucauccccagaagccaggagagcaagugcaacgaguacaucaacaacggccugagcggcggcgacaucaucaagcugcugaacgagcaggugaacaaggagaugcagagcagcaaccuguacaugagcaugagcagcuggugcuacacccacagccuggacggcgccggccuguuccuguucgaccacgccgccgaggaguacgagcacgccaagaagcugaucaucuuccugaacgagaacaacgugcccgugcagcugaccagcaucagcgcccccgagcacaaguucgagggccugacccagaucuuccagaaggccuacgagcacgagcagcacaucagcgagagcaucaacaacaucguggaccacgccaucaagagcaaggaccacgccaccuucaacuuccugcagugguacguggccgagcagcacgaggaggaggugcuguucaaggacauccuggacaagaucgagcugaucggcaacgagaaccacggccuguaccuggccgaccaguacgugaagggcaucgccaagagcagaaagagcuga

SEQ ID NO: 440 - RNA, 1113 nt, Artificial Sequence
  derived and/or modified CDS sequence (opt4) from RVA/Wa/P[8]__AAA47290.1__P2_VP8*(41-223)_Ferritin
augcaguacaucaaggccaacagcaaguucaucggcaucaccgagcugggcagcggcagcggcgcccagaccagauacgcccccgugaacuggggccacggcgagaucaacgacagcaccaccguggagcccauccuggacggccccuaccagcccaccaccuucaccccccccaacgacuacuggauccugaucaacagcaacaccaacggcgugguguacgagagcaccaacaacagcgacuucuggaccgccgugguggccaucgagccccacgugaaccccguggacagacaguacaccaucuucggcgagagcaagcaguucaacgugagcaacgacagcaacaaguggaaguuccuggagauguucagaagcagcagccagaacgaguucuacaacagaagaacccugaccagcgacaccagauucgugggcauccugaaguacggcggcagaguguggaccuuccacggcgagacccccagagccaccaccgacagcagcagcaccgccaaccugaacaacaucagcaucaccauccacagcgaguucuacaucauccccagaagccaggagagcaagugcaacgaguacaucaacaacggccugagcggcggcgacaucaucaagcugcugaacgagcaggugaacaaggagaugcagagcagcaaccuguacaugagcaugagcagcuggugcuacacccacagccuggacggcgccggccuguuccuguucgaccacgccgccgaggaguacgagcacgccaagaagcugaucaucuuccugaacgagaacaacgugcccgugcagcugaccagcaucagcgcccccgagcacaaguucgagggccugacccagaucuuccagaaggccuacgagcacgagcagcacaucagcgagagcaucaacaacaucguggaccacgccaucaagagcaaggaccacgccaccuucaacuuccugcagugguacguggccgagcagcacgaggaggaggugcuguucaaggacauccuggacaagaucgagcugaucggcaacgagaaccacggccuguaccuggccgaccaguacgugaagggcaucgccaagagcagaaagagcuga

SEQ ID NO: 441 - RNA, 1113 nt, Artificial Sequence
  derived and/or modified CDS sequence (opt4) from RVA/Wa/P[8]__AAA66953.1__P2_VP8*(41-223)_Ferritin
augcaguacaucaaggccaacagcaaguucaucggcaucaccgagcugggcagcggcagcggcgcccagaccagauacgcccccgugaacuggggccacggcgagaucaacgacagcaccaccguggagcccaugcuggacggccccuaccagcccaccaccuucaccccccccaacgacuacuggauccugaucaacagcaacaccaacggcgugguguacgagagcaccaacaacagcgacuucuggaccgccgugguggccaucgagccccacgugaaccccguggacagacaguacaccaucuucggcgagagcaagcaguucaacgugagcaacgacagcaacaaguggaaguuccuggagauguucagaagcagcagccagaacgaguucuacaacagaagaacccugaccagcgacaccagauucgugggcauccugaaguacggcggcagaguguggaccuuccacggcgagacccccagagccaccaccgacagcagcagcaccgccaaccugaacaacaucagcaucaccauccacagcgaguucuacaucauccccagaagccaggagagcaagugcaacgaguacaucaacaacggccugagcggcggcgacaucaucaagcugcugaacgagcaggugaacaaggagaugcagagcagcaaccuguacaugagcaugagcagcuggugcuacacccacagccuggacggcgccggccuguuccuguucgaccacgccgccgaggaguacgagcacgccaagaagcugaucaucuuccugaacgagaacaacgugcccgugcagcugaccagcaucagcgcccccgagcacaaguucgagggccugacccagaucuuccagaaggccuacgagcacgagcagcacaucagcgagagcaucaacaacaucguggaccacgccaucaagagcaaggaccacgccaccuucaacuuccugcagugguacguggccgagcagcacgaggaggaggugcuguucaaggacauccuggacaagaucgagcugaucggcaacgagaaccacggccuguaccuggccgaccaguacgugaagggcaucgccaagagcagaaagagcuga

SEQ ID NO: 442 - RNA, 1047 nt, Artificial Sequence
  derived and/or modified CDS sequence (opt4) from RVA/BE1058/P[4]__AEX30665.1__LumSynt_P2_VP8*(65-223)
augcagaucuacgagggcaagcugaccgccgagggccugagauucggcaucguggccagcagauucaaccacgcccugguggacagacugguggagggcgccaucgacgccaucgugagacacggcggcagagaggaggacaucacccuggugagagugcccggcagcugggagauccccguggccgccggcgagcuggccagaaaggaggacaucgacgccgugaucgccaucggcgugcugaucagaggcgccaccccccacuucgacuacaucgccagcgaggugagcaagggccuggccgaccugagccuggagcugagaaagcccaucaccuucggcgugaucaccgccgacacccuggagcaggccaucgagagagccggcaccaagcacggcaacaagggcugggaggccgcccugagcgccaucgagauggccaaccuguucaagagccugagaggcggcagcggcggcagcggcggcagcggcggcagcggcggcggccaguacaucaaggccaacagcaaguucaucggcaucaccgagcugggcagcggcagcggccuggacggccccuaccagcccaccaccuucaagccccccaacgacuacuggcugcugaucagcagcaacaccgacggcgugguguacgagagcaccaacaacagcgacuucuggaccgccgugaucgccguggagccccacgugaaccagaccaacagacaguacgugcuguucggcgagaacaagcaguucaacaucgagaacagcagcgacaaguggaaguucuucgagauguucaagggcaacagccagagcgacuucagcaacagaagaacccugaccagcagcaacagacuggugggcaugcugaaguacggcggcagaguguggaccuuccacggcgagacccccagagccaccaccgacagcagcagcaccgccgaccugaacaacaucagcaucaucauccacagcgaguucuacaucauccccagaagccaggagagcaagugcaacgaguacaucaacaacggccuguga

SEQ ID NO: 443 - RNA, 1047 nt, Artificial Sequence
  derived and/or modified CDS sequence (opt4) from RVA/DS-1/P[4]__CAD62680.1__LumSynt_P2_VP8*(65-223)
augcagaucuacgagggcaagcugaccgccgagggccugagauucggcaucguggccagcagauucaaccacgcccugguggacagacugguggagggcgccaucgacgccaucgugagacacggcggcagagaggaggacaucacccuggugagagugcccggcagcugggagauccccguggccgccggcgagcuggccagaaaggaggacaucgacgccgugaucgccaucggcgugcugaucagaggcgccaccccccacuucgacuacaucgccagcgaggugagcaagggccuggccgaccugagccuggagcugagaaagcccaucaccuucggcgugaucaccgccgacacccuggagcaggccaucgagagagccggcaccaagcacggcaacaagggcugggaggccgcccugagcgccaucgagauggccaaccuguucaagagccugagaggcggcagcggcggcagcggcggcagcggcggcagcggcggcggccaguacaucaaggccaacagcaaguucaucggcaucaccgagcugggcagcggcagcggccuggacggccccuaccagcccaccaccuucaagccccccaacgacuacuggcugcugaucagcagcaacaccaacggcgugguguacgagagcaccaacaacaacgacuucuggaccgccgugagcagcguggagccccacgugagccagaccaacagacaguacauccuguucggcgagaacaagcaguucaacguggagaacaacagcgacaaguggaaguucuucgagaccuucaccggcagcagccagggcaacuucagcaacagaagaacccugaccagcagcaacagacuggugggcaugcugaaguacggcggcagaguguggaccuuccacggcgagacccccagagccaccaccgacagcagcaacaccgccgaccugaacaacaucagcaucaucauccacagcgaguucuacaucauccccagaagccaggagagcaagugcaacgaguacaucaacaacggccuguga

SEQ ID NO: 444 - RNA, 1047 nt, Artificial Sequence; identical to SEQ ID NO: 443
  derived and/or modified CDS sequence (opt4) from RVA/DS-1/P[4]__ABV53252.1__LumSynt_P2_VP8*(65-223)

SEQ ID NO: 445 - RNA, 1047 nt, Artificial Sequence
  derived and/or modified CDS sequence (opt4) from RVA/F01322/P[6]__AFA51886.1__LumSynt_P2_VP8*(65-223)
augcagaucuacgagggcaagcugaccgccgagggccugagauucggcaucguggccagcagauucaaccacgcccugguggacagacugguggagggcgccaucgacgccaucgugagacacggcggcagagaggaggacaucacccuggugagagugcccggcagcugggagauccccguggccgccggcgagcuggccagaaaggaggacaucgacgccgugaucgccaucggcgugcugaucagaggcgccaccccccacuucgacuacaucgccagcgaggugagcaagggccuggccgaccugagccuggagcugagaaagcccaucaccuucggcgugaucaccgccgacacccuggagcaggccaucgagagagccggcaccaagcacggcaacaagggcugggaggccgcccugagcgccaucgagauggccaaccuguucaagagccugagaggcggcagcggcggcagcggcggcagcggcggcagcggcggcggccaguacaucaaggccaacagcaaguucaucggcaucaccgagcugggcagcggcagcggccuggacggccccuaccagcccaccaacuucaagccccccaacgacuacuggauccugcugaaccccaccaaccagcagguggugcuggagggcaccaacaagaccgacaucuggguggcccugcugcugguggagcccaacgugaccaaccagagcagacaguacacccuguucggcgagaccaagcagaucaccguggagaacaacaccaacaaguggaaguucuucgagauguucagaagcagcgugagcgccgaguuccagcacaagagaacccugaccagcgacaccaagcuggccggcuucaugaaguucuacaacagcguguggaccuuccacggcgagacccccaacgccaccaccgacuacagcagcaccagcaaccuguucgagguggagaccgugauccacguggaguucuacaucauccccagaagccaggagagcaagugcagcgaguacaucaacaccggccuguga

SEQ ID NO: 446 - RNA, 1047 nt, Artificial Sequence
  derived and/or modified CDS sequence (opt4) from RVA/1076/P[6]__AAA47337.1__LumSynt_P2_VP8*(65-223)
augcagaucuacgagggcaagcugaccgccgagggccugagauucggcaucguggccagcagauucaaccacgcccugguggacagacugguggagggcgccaucgacgccaucgugagacacggcggcagagaggaggacaucacccuggugagagugcccggcagcugggagauccccguggccgccggcgagcuggccagaaaggaggacaucgacgccgugaucgccaucggcgugcugaucagaggcgccaccccccacuucgacuacaucgccagcgaggugagcaagggccuggccgaccugagccuggagcugagaaagcccaucaccuucggcgugaucaccgccgacacccuggagcaggccaucgagagagccggcaccaagcacggcaacaagggcugggaggccgcccugagcgccaucgagauggccaaccuguucaagagccugagaggcggcagcggcggcagcggcggcagcggcggcagcggcggcggccaguacaucaaggccaacagcaaguucaucggcaucaccgagcugggcagcggcagcggccuggacggccccuaccagcccaccagcuucaagccccccagcgacuacuggauccugcugaaccccaccaaccagcagguggugcuggagggcaccaacaagaccgacaucuggguggcccugcugcugguggagcccaacgugaccaaccagagcagacaguacacccuguucggcgagaccaagcagaucaccguggagaacaacaccaacaaguggaaguucuucgagauguucagaagcagcgugagcgccgaguuccagcacaagagaacccugaccagcgacaccaagcuggccggcuuccugaaguucuacaacagcguguggaccuucuacggcgagaccccccacgccaccaccgacuacagcagcaccagcaaccugagcgagguggagaccgccauccacguggaguucuacaucauccccagaagccaggagagcaagugcaacgaguacaucaacaccggccuguga

SEQ ID NO: 447 - RNA, 1047 nt, Artificial Sequence
  derived and/or modified CDS sequence (opt4) from RVA/BE1128/P[8]__AEX30671.1__LumSynt_P2_VP8*(65-223)
augcagaucuacgagggcaagcugaccgccgagggccugagauucggcaucguggccagcagauucaaccacgcccugguggacagacugguggagggcgccaucgacgccaucgugagacacggcggcagagaggaggacaucacccuggugagagugcccggcagcugggagauccccguggccgccggcgagcuggccagaaaggaggacaucgacgccgugaucgccaucggcgugcugaucagaggcgccaccccccacuucgacuacaucgccagcgaggugagcaagggccuggccgaccugagccuggagcugagaaagcccaucaccuucggcgugaucaccgccgacacccuggagcaggccaucgagagagccggcaccaagcacggcaacaagggcugggaggccgcccugagcgccaucgagauggccaaccuguucaagagccugagaggcggcagcggcggcagcggcggcagcggcggcagcggcggcggccaguacaucaaggccaacagcaaguucaucggcaucaccgagcugggcagcggcagcggccuggacggccccuaccagcccaccaccuucaccccccccaccgacuacuggauccugaucaccagcaacaccaacggcgugguguacgagagcaccaacaacagcgacuucuggaccgccgugaucgccguggagccccacgugaaccccguggacagacaguacaacguguucggcgagaacaagcaguucaacgugagaaacgacagcgacaaguggaaguuccuggagauguucagaggcagcagccagaacgacuucuacaacagaagaacccugaccagcgacaccagacuggugggcauccugaaguacggcggcagaguguggaccuuccacggcgagacccccagagccaccaccgacagcagcaacaccgccaaccuggacggcaucagcaucaccauccacagcgaguucuacaucauccccagaagccaggagagcaagugcaacgaguacaucaacaacggccuguga

SEQ ID NO: 448 - RNA, 1047 nt, Artificial Sequence
  derived and/or modified CDS sequence (opt4) from RVA/Wa-VirWa/P[8]__ACR22783.1__LumSynt_P2_VP8*(65-223)
augcagaucuacgagggcaagcugaccgccgagggccugagauucggcaucguggccagcagauucaaccacgcccugguggacagacugguggagggcgccaucgacgccaucgugagacacggcggcagagaggaggacaucacccuggugagagugcccggcagcugggagauccccguggccgccggcgagcuggccagaaaggaggacaucgacgccgugaucgccaucggcgugcugaucagaggcgccaccccccacuucgacuacaucgccagcgaggugagcaagggccuggccgaccugagccuggagcugagaaagcccaucaccuucggcgugaucaccgccgacacccuggagcaggccaucgagagagccggcaccaagcacggcaacaagggcugggaggccgcccugagcgccaucgagauggccaaccuguucaagagccugagaggcggcagcggcggcagcggcggcagcggcggcagcggcggcggccaguacaucaaggccaacagcaaguucaucggcaucaccgagcugggcagcggcagcggccuggacggccccuaccagcccaccaccuucaccccccccaacgacuacuggauccugaucaacagcaacaccaacggcgugguguacgagagcaccaacaacagcgacuucuggaccgccgugguggccaucgagccccacgugaaccccguggacagacaguacaccaucuucggcgagagcaagcaguucaacgugagaaacgacagcaacaaguggaaguuccuggagauguucagaagcagcagccagaacgaguucuacaacagaagaacccugaccagcgacaccagacuggugggcauccugaaguacggcggcagaguguggaccuuccacggcgagacccccagagccaccaccgacagcagcagcaccgccaaccugaacaacaucagcaucaccauccacagcgaguucuacaucauccccagaagccaggagagcaagugcaacgaguacaucaacaacggccuguga

SEQ ID NO: 449 - RNA, 1047 nt, Artificial Sequence
  derived and/or modified CDS sequence (opt4) from RVA/Wa/P[8]__AAA47290.1__LumSynt_P2_VP8*(65-223)
augcagaucuacgagggcaagcugaccgccgagggccugagauucggcaucguggccagcagauucaaccacgcccugguggacagacugguggagggcgccaucgacgccaucgugagacacggcggcagagaggaggacaucacccuggugagagugcccggcagcugggagauccccguggccgccggcgagcuggccagaaaggaggacaucgacgccgugaucgccaucggcgugcugaucagaggcgccaccccccacuucgacuacaucgccagcgaggugagcaagggccuggccgaccugagccuggagcugagaaagcccaucaccuucggcgugaucaccgccgacacccuggagcaggccaucgagagagccggcaccaagcacggcaacaagggcugggaggccgcccugagcgccaucgagauggccaaccuguucaagagccugagaggcggcagcggcggcagcggcggcagcggcggcagcggcggcggccaguacaucaaggccaacagcaaguucaucggcaucaccgagcugggcagcggcagcggccuggacggccccuaccagcccaccaccuucaccccccccaacgacuacuggauccugaucaacagcaacaccaacggcgugguguacgagagcaccaacaacagcgacuucuggaccgccgugguggccaucgagccccacgugaaccccguggacagacaguacaccaucuucggcgagagcaagcaguucaacgugagcaacgacagcaacaaguggaaguuccuggagauguucagaagcagcagccagaacgaguucuacaacagaagaacccugaccagcgacaccagauucgugggcauccugaaguacggcggcagaguguggaccuuccacggcgagacccccagagccaccaccgacagcagcagcaccgccaaccugaacaacaucagcaucaccauccacagcgaguucuacaucauccccagaagccaggagagcaagugcaacgaguacaucaacaacggccuguga

SEQ ID NO: 450 - RNA, 1047 nt, Artificial Sequence; identical to SEQ ID NO: 449
  derived and/or modified CDS sequence (opt4) from RVA/Wa/P[8]__AAA66953.1__LumSynt_P2_VP8*(65-223)

SEQ ID NO: 451 - RNA, 1119 nt, Artificial Sequence
  derived and/or modified CDS sequence (opt4) from RVA/BE1058/P[4]__AEX30665.1__LumSynt_P2_VP8*(41-223)
augcagaucuacgagggcaagcugaccgccgagggccugagauucggcaucguggccagcagauucaaccacgcccugguggacagacugguggagggcgccaucgacgccaucgugagacacggcggcagagaggaggacaucacccuggugagagugcccggcagcugggagauccccguggccgccggcgagcuggccagaaaggaggacaucgacgccgugaucgccaucggcgugcugaucagaggcgccaccccccacuucgacuacaucgccagcgaggugagcaagggccuggccgaccugagccuggagcugagaaagcccaucaccuucggcgugaucaccgccgacacccuggagcaggccaucgagagagccggcaccaagcacggcaacaagggcugggaggccgcccugagcgccaucgagauggccaaccuguucaagagccugagaggcggcagcggcggcagcggcggcagcggcggcagcggcggcggccaguacaucaaggccaacagcaaguucaucggcaucaccgagcugggcagcggcagcggcgcccagaccagauacgcccccgugaacuggggccacggcgagaucaacgacagcaccaccguggagcccgugcuggacggccccuaccagcccaccaccuucaagccccccaacgacuacuggcugcugaucagcagcaacaccgacggcgugguguacgagagcaccaacaacagcgacuucuggaccgccgugaucgccguggagccccacgugaaccagaccaacagacaguacgugcuguucggcgagaacaagcaguucaacaucgagaacagcagcgacaaguggaaguucuucgagauguucaagggcaacagccagagcgacuucagcaacagaagaacccugaccagcagcaacagacuggugggcaugcugaaguacggcggcagaguguggaccuuccacggcgagacccccagagccaccaccgacagcagcagcaccgccgaccugaacaacaucagcaucaucauccacagcgaguucuacaucauccccagaagccaggagagcaagugcaacgaguacaucaacaacggccuguga

SEQ ID NO: 452 - RNA, 1119 nt, Artificial Sequence
  derived and/or modified CDS sequence (opt4) from RVA/DS-1/P[4]__CAD62680.1__LumSynt_P2_VP8*(41-223)
augcagaucuacgagggcaagcugaccgccgagggccugagauucggcaucguggccagcagauucaaccacgcccugguggacagacugguggagggcgccaucgacgccaucgugagacacggcggcagagaggaggacaucacccuggugagagugcccggcagcugggagauccccguggccgccggcgagcuggccagaaaggaggacaucgacgccgugaucgccaucggcgugcugaucagaggcgccaccccccacuucgacuacaucgccagcgaggugagcaagggccuggccgaccugagccuggagcugagaaagcccaucaccuucggcgugaucaccgccgacacccuggagcaggccaucgagagagccggcaccaagcacggcaacaagggcugggaggccgcccugagcgccaucgagauggccaaccuguucaagagccugagaggcggcagcggcggcagcggcggcagcggcggcagcggcggcggccaguacaucaaggccaacagcaaguucaucggcaucaccgagcugggcagcggcagcggcgcccagaccagauacgcccccgugaacuggggcagcugggagaucaacgacagcaccaccguggagcccgugcuggacggccccuaccagcccaccaccuucaagccccccaacgacuacuggcugcugaucagcagcaacaccaacggcgugguguacgagagcaccaacaacaacgacuucuggaccgccgugagcagcguggagccccacgugagccagaccaacagacaguacauccuguucggcgagaacaagcaguucaacguggagaacaacagcgacaaguggaaguucuucgagaccuucaccggcagcagccagggcaacuucagcaacagaagaacccugaccagcagcaacagacuggugggcaugcugaaguacggcggcagaguguggaccuuccacggcgagacccccagagccaccaccgacagcagcaacaccgccgaccugaacaacaucagcaucaucauccacagcgaguucuacaucauccccagaagccaggagagcaagugcaacgaguacaucaacaacggccuguga

SEQ ID NO: 453 - RNA, 1119 nt, Artificial Sequence; identical to SEQ ID NO: 452
  derived and/or modified CDS sequence (opt4) from RVA/DS-1/P[4]__ABV53252.1__LumSynt_P2_VP8*(41-223)

SEQ ID NO: 454 - RNA, 1119 nt, Artificial Sequence
  derived and/or modified CDS sequence (opt4) from RVA/F01322/P[6]__AFA51886.1__LumSynt_P2_VP8*(41-223)
augcagaucuacgagggcaagcugaccgccgagggccugagauucggcaucguggccagcagauucaaccacgcccugguggacagacugguggagggcgccaucgacgccaucgugagacacggcggcagagaggaggacaucacccuggugagagugcccggcagcugggagauccccguggccgccggcgagcuggccagaaaggaggacaucgacgccgugaucgccaucggcgugcugaucagaggcgccaccccccacuucgacuacaucgccagcgaggugagcaagggccuggccgaccugagccuggagcugagaaagcccaucaccuucggcgugaucaccgccgacacccuggagcaggccaucgagagagccggcaccaagcacggcaacaagggcugggaggccgcccugagcgccaucgagauggccaaccuguucaagagccugagaggcggcagcggcggcagcggcggcagcggcggcagcggcggcggccaguacaucaaggccaacagcaaguucaucggcaucaccgagcugggcagcggcagcggcgcccagaccaacuacgcccccgugaccuggagccacggcgaggugaacgacagcaccaccaucgagcccgugcuggacggccccuaccagcccaccaacuucaagccccccaacgacuacuggauccugcugaaccccaccaaccagcagguggugcuggagggcaccaacaagaccgacaucuggguggcccugcugcugguggagcccaacgugaccaaccagagcagacaguacacccuguucggcgagaccaagcagaucaccguggagaacaacaccaacaaguggaaguucuucgagauguucagaagcagcgugagcgccgaguuccagcacaagagaacccugaccagcgacaccaagcuggccggcuucaugaaguucuacaacagcguguggaccuuccacggcgagacccccaacgccaccaccgacuacagcagcaccagcaaccuguucgagguggagaccgugauccacguggaguucuacaucauccccagaagccaggagagcaagugcagcgaguacaucaacaccggccuguga

SEQ ID NO: 455 - RNA, 1119 nt, Artificial Sequence
  derived and/or modified CDS sequence (opt4) from RVA/1076/P[6]__AAA47337.1__LumSynt_P2_VP8*(41-223)
augcagaucuacgagggcaagcugaccgccgagggccugagauucggcaucguggccagcagauucaaccacgcccugguggacagacugguggagggcgccaucgacgccaucgugagacacggcggcagagaggaggacaucacccuggugagagugcccggcagcugggagauccccguggccgccggcgagcuggccagaaaggaggacaucgacgccgugaucgccaucggcgugcugaucagaggcgccaccccccacuucgacuacaucgccagcgaggugagcaagggccuggccgaccugagccuggagcugagaaagcccaucaccuucggcgugaucaccgccgacacccuggagcaggccaucgagagagccggcaccaagcacggcaacaagggcugggaggccgcccugagcgccaucgagauggccaaccuguucaagagccugagaggcggcagcggcggcagcggcggcagcggcggcagcggcggcggccaguacaucaaggccaacagcaaguucaucggcaucaccgagcugggcagcggcagcggcgcccagaccaacuacgcccccgugaccuggagccacggcgaggugaacgacagcaccaccaucgagcccgugcuggacggccccuaccagcccaccagcuucaagccccccagcgacuacuggauccugcugaaccccaccaaccagcagguggugcuggagggcaccaacaagaccgacaucuggguggcccugcugcugguggagcccaacgugaccaaccagagcagacaguacacccuguucggcgagaccaagcagaucaccguggagaacaacaccaacaaguggaaguucuucgagauguucagaagcagcgugagcgccgaguuccagcacaagagaacccugaccagcgacaccaagcuggccggcuuccugaaguucuacaacagcguguggaccuucuacggcgagaccccccacgccaccaccgacuacagcagcaccagcaaccugagcgagguggagaccgccauccacguggaguucuacaucauccccagaagccaggagagcaagugcaacgaguacaucaacaccggccuguga

SEQ ID NO: 456 - RNA, 1119 nt, Artificial Sequence
  derived and/or modified CDS sequence (opt4) from RVA/BE1128/P[8]__AEX30671.1__LumSynt_P2_VP8*(41-223)
augcagaucuacgagggcaagcugaccgccgagggccugagauucggcaucguggccagcagauucaaccacgcccugguggacagacugguggagggcgccaucgacgccaucgugagacacggcggcagagaggaggacaucacccuggugagagugcccggcagcugggagauccccguggccgccggcgagcuggccagaaaggaggacaucgacgccgugaucgccaucggcgugcugaucagaggcgccaccccccacuucgacuacaucgccagcgaggugagcaagggccuggccgaccugagccuggagcugagaaagcccaucaccuucggcgugaucaccgccgacacccuggagcaggccaucgagagagccggcaccaagcacggcaacaagggcugggaggccgcccugagcgccaucgagauggccaaccuguucaagagccugagaggcggcagcggcggcagcggcggcagcggcggcagcggcggcggccaguacaucaaggccaacagcaaguucaucggcaucaccgagcugggcagcggcagcggcgcccagaccagauacgcccccgugaacuggggccacggcgagaucaacgacagcaccaccguggagcccauccuggacggccccuaccagcccaccaccuucaccccccccaccgacuacuggauccugaucaccagcaacaccaacggcgugguguacgagagcaccaacaacagcgacuucuggaccgccgugaucgccguggagccccacgugaaccccguggacagacaguacaacguguucggcgagaacaagcaguucaacgugagaaacgacagcgacaaguggaaguuccuggagauguucagaggcagcagccagaacgacuucuacaacagaagaacccugaccagcgacaccagacuggugggcauccugaaguacggcggcagaguguggaccuuccacggcgagacccccagagccaccaccgacagcagcaacaccgccaaccuggacggcaucagcaucaccauccacagcgaguucuacaucauccccagaagccaggagagcaagugcaacgaguacaucaacaacggccuguga

SEQ ID NO: 457 - RNA, 1119 nt, Artificial Sequence
  derived and/or modified CDS sequence (opt4) from RVA/Wa-VirWa/P[8]__ACR22783.1__LumSynt_P2_VP8*(41-223)
augcagaucuacgagggcaagcugaccgccgagggccugagauucggcaucguggccagcagauucaaccacgcccugguggacagacugguggagggcgccaucgacgccaucgugagacacggcggcagagaggaggacaucacccuggugagagugcccggcagcugggagauccccguggccgccggcgagcuggccagaaaggaggacaucgacgccgugaucgccaucggcgugcugaucagaggcgccaccccccacuucgacuacaucgccagcgaggugagcaagggccuggccgaccugagccuggagcugagaaagcccaucaccuucggcgugaucaccgccgacacccuggagcaggccaucgagagagccggcaccaagcacggcaacaagggcugggaggccgcccugagcgccaucgagauggccaaccuguucaagagccugagaggcggcagcggcggcagcggcggcagcggcggcagcggcggcggccaguacaucaaggccaacagcaaguucaucggcaucaccgagcugggcagcggcagcggcgcccagaccagauacgcccccgugaacuggggccacggcgagaucaacgacagcaccaccguggagcccauccuggacggccccuaccagcccaccaccuucaccccccccaacgacuacuggauccugaucaacagcaacaccaacggcgugguguacgagagcaccaacaacagcgacuucuggaccgccgugguggccaucgagccccacgugaaccccguggacagacaguacaccaucuucggcgagagcaagcaguucaacgugagaaacgacagcaacaaguggaaguuccuggagauguucagaagcagcagccagaacgaguucuacaacagaagaacccugaccagcgacaccagacuggugggcauccugaaguacggcggcagaguguggaccuuccacggcgagacccccagagccaccaccgacagcagcagcaccgccaaccugaacaacaucagcaucaccauccacagcgaguucuacaucauccccagaagccaggagagcaagugcaacgaguacaucaacaacggccuguga

SEQ ID NO: 458 - RNA, 1119 nt, Artificial Sequence
  derived and/or modified CDS sequence (opt4) from RVA/Wa/P[8]__AAA47290.1__LumSynt_P2_VP8*(41-223)
augcagaucuacgagggcaagcugaccgccgagggccugagauucggcaucguggccagcagauucaaccacgcccugguggacagacugguggagggcgccaucgacgccaucgugagacacggcggcagagaggaggacaucacccuggugagagugcccggcagcugggagauccccguggccgccggcgagcuggccagaaaggaggacaucgacgccgugaucgccaucggcgugcugaucagaggcgccaccccccacuucgacuacaucgccagcgaggugagcaagggccuggccgaccugagccuggagcugagaaagcccaucaccuucggcgugaucaccgccgacacccuggagcaggccaucgagagagccggcaccaagcacggcaacaagggcugggaggccgcccugagcgccaucgagauggccaaccuguucaagagccugagaggcggcagcggcggcagcggcggcagcggcggcagcggcggcggccaguacaucaaggccaacagcaaguucaucggcaucaccgagcugggcagcggcagcggcgcccagaccagauacgcccccgugaacuggggccacggcgagaucaacgacagcaccaccguggagcccauccuggacggccccuaccagcccaccaccuucaccccccccaacgacuacuggauccugaucaacagcaacaccaacggcgugguguacgagagcaccaacaacagcgacuucuggaccgccgugguggccaucgagccccacgugaaccccguggacagacaguacaccaucuucggcgagagcaagcaguucaacgugagcaacgacagcaacaaguggaaguuccuggagauguucagaagcagcagccagaacgaguucuacaacagaagaacccugaccagcgacaccagauucgugggcauccugaaguacggcggcagaguguggaccuuccacggcgagacccccagagccaccaccgacagcagcagcaccgccaaccugaacaacaucagcaucaccauccacagcgaguucuacaucauccccagaagccaggagagcaagugcaacgaguacaucaacaacggccuguga

SEQ ID NO: 459 - RNA, 1119 nt, Artificial Sequence
  derived and/or modified CDS sequence (opt4) from RVA/Wa/P[8]__AAA66953.1__LumSynt_P2_VP8*(41-223)
augcagaucuacgagggcaagcugaccgccgagggccugagauucggcaucguggccagcagauucaaccacgcccugguggacagacugguggagggcgccaucgacgccaucgugagacacggcggcagagaggaggacaucacccuggugagagugcccggcagcugggagauccccguggccgccggcgagcuggccagaaaggaggacaucgacgccgugaucgccaucggcgugcugaucagaggcgccaccccccacuucgacuacaucgccagcgaggugagcaagggccuggccgaccugagccuggagcugagaaagcccaucaccuucggcgugaucaccgccgacacccuggagcaggccaucgagagagccggcaccaagcacggcaacaagggcugggaggccgcccugagcgccaucgagauggccaaccuguucaagagccugagaggcggcagcggcggcagcggcggcagcggcggcagcggcggcggccaguacaucaaggccaacagcaaguucaucggcaucaccgagcugggcagcggcagcggcgcccagaccagauacgcccccgugaacuggggccacggcgagaucaacgacagcaccaccguggagcccaugcuggacggccccuaccagcccaccaccuucaccccccccaacgacuacuggauccugaucaacagcaacaccaacggcgugguguacgagagcaccaacaacagcgacuucuggaccgccgugguggccaucgagccccacgugaaccccguggacagacaguacaccaucuucggcgagagcaagcaguucaacgugagcaacgacagcaacaaguggaaguuccuggagauguucagaagcagcagccagaacgaguucuacaacagaagaacccugaccagcgacaccagauucgugggcauccugaaguacggcggcagaguguggaccuuccacggcgagacccccagagccaccaccgacagcagcagcaccgccaaccugaacaacaucagcaucaccauccacagcgaguucuacaucauccccagaagccaggagagcaagugcaacgaguacaucaacaacggccuguga

SEQ ID NO: 460 - RNA, 594 nt, Artificial Sequence
  derived and/or modified CDS sequence (opt4) from RVA/BE1058/P[4]__AEX30665.1__SP-IgE_P2_VP8*(65-223)
auggacuggaccuggauccuguuccugguggccgccgccaccagagugcacagccaguacaucaaggccaacagcaaguucaucggcaucaccgagcugggcagcggcagcggccuggacggccccuaccagcccaccaccuucaagccccccaacgacuacuggcugcugaucagcagcaacaccgacggcgugguguacgagagcaccaacaacagcgacuucuggaccgccgugaucgccguggagccccacgugaaccagaccaacagacaguacgugcuguucggcgagaacaagcaguucaacaucgagaacagcagcgacaaguggaaguucuucgagauguucaagggcaacagccagagcgacuucagcaacagaagaacccugaccagcagcaacagacuggugggcaugcugaaguacggcggcagaguguggaccuuccacggcgagacccccagagccaccaccgacagcagcagcaccgccgaccugaacaacaucagcaucaucauccacagcgaguucuacaucauccccagaagccaggagagcaagugcaacgaguacaucaacaacggccuguga

SEQ ID NO: 461 - RNA, 594 nt, Artificial Sequence
  derived and/or modified CDS sequence (opt4) from RVA/DS-1/P[4]__CAD62680.1__SP-IgE_P2_VP8*(65-223)
auggacuggaccuggauccuguuccugguggccgccgccaccagagugcacagccaguacaucaaggccaacagcaaguucaucggcaucaccgagcugggcagcggcagcggccuggacggccccuaccagcccaccaccuucaagccccccaacgacuacuggcugcugaucagcagcaacaccaacggcgugguguacgagagcaccaacaacaacgacuucuggaccgccgugagcagcguggagccccacgugagccagaccaacagacaguacauccuguucggcgagaacaagcaguucaacguggagaacaacagcgacaaguggaaguucuucgagaccuucaccggcagcagccagggcaacuucagcaacagaagaacccugaccagcagcaacagacuggugggcaugcugaaguacggcggcagaguguggaccuuccacggcgagacccccagagccaccaccgacagcagcaacaccgccgaccugaacaacaucagcaucaucauccacagcgaguucuacaucauccccagaagccaggagagcaagugcaacgaguacaucaacaacggccuguga

SEQ ID NO: 462 - RNA, 594 nt, Artificial Sequence; identical to SEQ ID NO: 461
  derived and/or modified CDS sequence (opt4) from RVA/DS-1/P[4]__ABV53252.1__SP-IgE_P2_VP8*(65-223)

SEQ ID NO: 463 - RNA, 594 nt, Artificial Sequence
  derived and/or modified CDS sequence (opt4) from RVA/F01322/P[6]__AFA51886.1__SP-IgE_P2_VP8*(65-223)
auggacuggaccuggauccuguuccugguggccgccgccaccagagugcacagccaguacaucaaggccaacagcaaguucaucggcaucaccgagcugggcagcggcagcggccuggacggccccuaccagcccaccaacuucaagccccccaacgacuacuggauccugcugaaccccaccaaccagcagguggugcuggagggcaccaacaagaccgacaucuggguggcccugcugcugguggagcccaacgugaccaaccagagcagacaguacacccuguucggcgagaccaagcagaucaccguggagaacaacaccaacaaguggaaguucuucgagauguucagaagcagcgugagcgccgaguuccagcacaagagaacccugaccagcgacaccaagcuggccggcuucaugaaguucuacaacagcguguggaccuuccacggcgagacccccaacgccaccaccgacuacagcagcaccagcaaccuguucgagguggagaccgugauccacguggaguucuacaucauccccagaagccaggagagcaagugcagcgaguacaucaacaccggccuguga

SEQ ID NO: 464 - RNA, 594 nt, Artificial Sequence
  derived and/or modified CDS sequence (opt4) from RVA/1076/P[6]__AAA47337.1__SP-IgE_P2_VP8*(65-223)
auggacuggaccuggauccuguuccugguggccgccgccaccagagugcacagccaguacaucaaggccaacagcaaguucaucggcaucaccgagcugggcagcggcagcggccuggacggccccuaccagcccaccagcuucaagccccccagcgacuacuggauccugcugaaccccaccaaccagcagguggugcuggagggcaccaacaagaccgacaucuggguggcccugcugcugguggagcccaacgugaccaaccagagcagacaguacacccuguucggcgagaccaagcagaucaccguggagaacaacaccaacaaguggaaguucuucgagauguucagaagcagcgugagcgccgaguuccagcacaagagaacccugaccagcgacaccaagcuggccggcuuccugaaguucuacaacagcguguggaccuucuacggcgagaccccccacgccaccaccgacuacagcagcaccagcaaccugagcgagguggagaccgccauccacguggaguucuacaucauccccagaagccaggagagcaagugcaacgaguacaucaacaccggccuguga

SEQ ID NO: 465 - RNA, 594 nt, Artificial Sequence
  derived and/or modified CDS sequence (opt4) from RVA/BE1128/P[8]__AEX30671.1__SP-IgE_P2_VP8*(65-223)
auggacuggaccuggauccuguuccugguggccgccgccaccagagugcacagccaguacaucaaggccaacagcaaguucaucggcaucaccgagcugggcagcggcagcggccuggacggccccuaccagcccaccaccuucaccccccccaccgacuacuggauccugaucaccagcaacaccaacggcgugguguacgagagcaccaacaacagcgacuucuggaccgccgugaucgccguggagccccacgugaaccccguggacagacaguacaacguguucggcgagaacaagcaguucaacgugagaaacgacagcgacaaguggaaguuccuggagauguucagaggcagcagccagaacgacuucuacaacagaagaacccugaccagcgacaccagacuggugggcauccugaaguacggcggcagaguguggaccuuccacggcgagacccccagagccaccaccgacagcagcaacaccgccaaccuggacggcaucagcaucaccauccacagcgaguucuacaucauccccagaagccaggagagcaagugcaacgaguacaucaacaacggccuguga

SEQ ID NO: 466 - RNA, 594 nt, Artificial Sequence
  derived and/or modified CDS sequence (opt4) from RVA/Wa-VirWa/P[8]__ACR22783.1__SP-IgE_P2_VP8*(65-223)
auggacuggaccuggauccuguuccugguggccgccgccaccagagugcacagccaguacaucaaggccaacagcaaguucaucggcaucaccgagcugggcagcggcagcggccuggacggccccuaccagcccaccaccuucaccccccccaacgacuacuggauccugaucaacagcaacaccaacggcgugguguacgagagcaccaacaacagcgacuucuggaccgccgugguggccaucgagccccacgugaaccccguggacagacaguacaccaucuucggcgagagcaagcaguucaacgugagaaacgacagcaacaaguggaaguuccuggagauguucagaagcagcagccagaacgaguucuacaacagaagaacccugaccagcgacaccagacuggugggcauccugaaguacggcggcagaguguggaccuuccacggcgagacccccagagccaccaccgacagcagcagcaccgccaaccugaacaacaucagcaucaccauccacagcgaguucuacaucauccccagaagccaggagagcaagugcaacgaguacaucaacaacggccuguga

SEQ ID NO: 467 - RNA, 594 nt, Artificial Sequence
  derived and/or modified CDS sequence (opt4) from RVA/Wa/P[8]__AAA47290.1__SP-IgE_P2_VP8*(65-223)
auggacuggaccuggauccuguuccugguggccgccgccaccagagugcacagccaguacaucaaggccaacagcaaguucaucggcaucaccgagcugggcagcggcagcggccuggacggccccuaccagcccaccaccuucaccccccccaacgacuacuggauccugaucaacagcaacaccaacggcgugguguacgagagcaccaacaacagcgacuucuggaccgccgugguggccaucgagccccacgugaaccccguggacagacaguacaccaucuucggcgagagcaagcaguucaacgugagcaacgacagcaacaaguggaaguuccuggagauguucagaagcagcagccagaacgaguucuacaacagaagaacccugaccagcgacaccagauucgugggcauccugaaguacggcggcagaguguggaccuuccacggcgagacccccagagccaccaccgacagcagcagcaccgccaaccugaacaacaucagcaucaccauccacagcgaguucuacaucauccccagaagccaggagagcaagugcaacgaguacaucaacaacggccuguga

SEQ ID NO: 468 - RNA, 594 nt, Artificial Sequence; identical to SEQ ID NO: 467
  derived and/or modified CDS sequence (opt4) from RVA/Wa/P[8]__AAA66953.1__SP-IgE_P2_VP8*(65-223)

SEQ ID NO: 469 - RNA, 666 nt, Artificial Sequence
  derived and/or modified CDS sequence (opt4) from RVA/BE1058/P[4]__AEX30665.1__SP-IgE_P2_VP8*(41-223)
auggacuggaccuggauccuguuccugguggccgccgccaccagagugcacagccaguacaucaaggccaacagcaaguucaucggcaucaccgagcugggcagcggcagcggcgcccagaccagauacgcccccgugaacuggggccacggcgagaucaacgacagcaccaccguggagcccgugcuggacggccccuaccagcccaccaccuucaagccccccaacgacuacuggcugcugaucagcagcaacaccgacggcgugguguacgagagcaccaacaacagcgacuucuggaccgccgugaucgccguggagccccacgugaaccagaccaacagacaguacgugcuguucggcgagaacaagcaguucaacaucgagaacagcagcgacaaguggaaguucuucgagauguucaagggcaacagccagagcgacuucagcaacagaagaacccugaccagcagcaacagacuggugggcaugcugaaguacggcggcagaguguggaccuuccacggcgagacccccagagccaccaccgacagcagcagcaccgccgaccugaacaacaucagcaucaucauccacagcgaguucuacaucauccccagaagccaggagagcaagugcaacgaguacaucaacaacggccuguga

SEQ ID NO: 470 - RNA, 666 nt, Artificial Sequence
  derived and/or modified CDS sequence (opt4) from RVA/DS-1/P[4]__CAD62680.1__SP-IgE_P2_VP8*(41-223)
auggacuggaccuggauccuguuccugguggccgccgccaccagagugcacagccaguacaucaaggccaacagcaaguucaucggcaucaccgagcugggcagcggcagcggcgcccagaccagauacgcccccgugaacuggggcagcugggagaucaacgacagcaccaccguggagcccgugcuggacggccccuaccagcccaccaccuucaagccccccaacgacuacuggcugcugaucagcagcaacaccaacggcgugguguacgagagcaccaacaacaacgacuucuggaccgccgugagcagcguggagccccacgugagccagaccaacagacaguacauccuguucggcgagaacaagcaguucaacguggagaacaacagcgacaaguggaaguucuucgagaccuucaccggcagcagccagggcaacuucagcaacagaagaacccugaccagcagcaacagacuggugggcaugcugaaguacggcggcagaguguggaccuuccacggcgagacccccagagccaccaccgacagcagcaacaccgccgaccugaacaacaucagcaucaucauccacagcgaguucuacaucauccccagaagccaggagagcaagugcaacgaguacaucaacaacggccuguga

SEQ ID NO: 471 - RNA, 666 nt, Artificial Sequence; identical to SEQ ID NO: 470
  derived and/or modified CDS sequence (opt4) from RVA/DS-1/P[4]__ABV53252.1__SP-IgE_P2_VP8*(41-223)

SEQ ID NO: 472 - RNA, 666 nt, Artificial Sequence
  derived and/or modified CDS sequence (opt4) from RVA/F01322/P[6]__AFA51886.1__SP-IgE_P2_VP8*(41-223)
auggacuggaccuggauccuguuccugguggccgccgccaccagagugcacagccaguacaucaaggccaacagcaaguucaucggcaucaccgagcugggcagcggcagcggcgcccagaccaacuacgcccccgugaccuggagccacggcgaggugaacgacagcaccaccaucgagcccgugcuggacggccccuaccagcccaccaacuucaagccccccaacgacuacuggauccugcugaaccccaccaaccagcagguggugcuggagggcaccaacaagaccgacaucuggguggcccugcugcugguggagcccaacgugaccaaccagagcagacaguacacccuguucggcgagaccaagcagaucaccguggagaacaacaccaacaaguggaaguucuucgagauguucagaagcagcgugagcgccgaguuccagcacaagagaacccugaccagcgacaccaagcuggccggcuucaugaaguucuacaacagcguguggaccuuccacggcgagacccccaacgccaccaccgacuacagcagcaccagcaaccuguucgagguggagaccgugauccacguggaguucuacaucauccccagaagccaggagagcaagugcagcgaguacaucaacaccggccuguga

SEQ ID NO: 473 - RNA, 666 nt, Artificial Sequence
  derived and/or modified CDS sequence (opt4) from RVA/1076/P[6]__AAA47337.1__SP-IgE_P2_VP8*(41-223)
auggacuggaccuggauccuguuccugguggccgccgccaccagagugcacagccaguacaucaaggccaacagcaaguucaucggcaucaccgagcugggcagcggcagcggcgcccagaccaacuacgcccccgugaccuggagccacggcgaggugaacgacagcaccaccaucgagcccgugcuggacggccccuaccagcccaccagcuucaagccccccagcgacuacuggauccugcugaaccccaccaaccagcagguggugcuggagggcaccaacaagaccgacaucuggguggcccugcugcugguggagcccaacgugaccaaccagagcagacaguacacccuguucggcgagaccaagcagaucaccguggagaacaacaccaacaaguggaaguucuucgagauguucagaagcagcgugagcgccgaguuccagcacaagagaacccugaccagcgacaccaagcuggccggcuuccugaaguucuacaacagcguguggaccuucuacggcgagaccccccacgccaccaccgacuacagcagcaccagcaaccugagcgagguggagaccgccauccacguggaguucuacaucauccccagaagccaggagagcaagugcaacgaguacaucaacaccggccuguga

SEQ ID NO: 474 - RNA, 666 nt, Artificial Sequence
  derived and/or modified CDS sequence (opt4) from RVA/BE1128/P[8]__AEX30671.1__SP-IgE_P2_VP8*(41-223)
auggacuggaccuggauccuguuccugguggccgccgccaccagagugcacagccaguacaucaaggccaacagcaaguucaucggcaucaccgagcugggcagcggcagcggcgcccagaccagauacgcccccgugaacuggggccacggcgagaucaacgacagcaccaccguggagcccauccuggacggccccuaccagcccaccaccuucaccccccccaccgacuacuggauccugaucaccagcaacaccaacggcgugguguacgagagcaccaacaacagcgacuucuggaccgccgugaucgccguggagccccacgugaaccccguggacagacaguacaacguguucggcgagaacaagcaguucaacgugagaaacgacagcgacaaguggaaguuccuggagauguucagaggcagcagccagaacgacuucuacaacagaagaacccugaccagcgacaccagacuggugggcauccugaaguacggcggcagaguguggaccuuccacggcgagacccccagagccaccaccgacagcagcaacaccgccaaccuggacggcaucagcaucaccauccacagcgaguucuacaucauccccagaagccaggagagcaagugcaacgaguacaucaacaacggccuguga

SEQ ID NO: 475 - RNA, 666 nt, Artificial Sequence
  derived and/or modified CDS sequence (opt4) from RVA/Wa-VirWa/P[8]__ACR22783.1__SP-IgE_P2_VP8*(41-223)
auggacuggaccuggauccuguuccugguggccgccgccaccagagugcacagccaguacaucaaggccaacagcaaguucaucggcaucaccgagcugggcagcggcagcggcgcccagaccagauacgcccccgugaacuggggccacggcgagaucaacgacagcaccaccguggagcccauccuggacggccccuaccagcccaccaccuucaccccccccaacgacuacuggauccugaucaacagcaacaccaacggcgugguguacgagagcaccaacaacagcgacuucuggaccgccgugguggccaucgagccccacgugaaccccguggacagacaguacaccaucuucggcgagagcaagcaguucaacgugagaaacgacagcaacaaguggaaguuccuggagauguucagaagcagcagccagaacgaguucuacaacagaagaacccugaccagcgacaccagacuggugggcauccugaaguacggcggcagaguguggaccuuccacggcgagacccccagagccaccaccgacagcagcagcaccgccaaccugaacaacaucagcaucaccauccacagcgaguucuacaucauccccagaagccaggagagcaagugcaacgaguacaucaacaacggccuguga

SEQ ID NO: 476 - RNA, 666 nt, Artificial Sequence
  derived and/or modified CDS sequence (opt4) from RVA/Wa/P[8]__AAA47290.1__SP-IgE_P2_VP8*(41-223)
auggacuggaccuggauccuguuccugguggccgccgccaccagagugcacagccaguacaucaaggccaacagcaaguucaucggcaucaccgagcugggcagcggcagcggcgcccagaccagauacgcccccgugaacuggggccacggcgagaucaacgacagcaccaccguggagcccauccuggacggccccuaccagcccaccaccuucaccccccccaacgacuacuggauccugaucaacagcaacaccaacggcgugguguacgagagcaccaacaacagcgacuucuggaccgccgugguggccaucgagccccacgugaaccccguggacagacaguacaccaucuucggcgagagcaagcaguucaacgugagcaacgacagcaacaaguggaaguuccuggagauguucagaagcagcagccagaacgaguucuacaacagaagaacccugaccagcgacaccagauucgugggcauccugaaguacggcggcagaguguggaccuuccacggcgagacccccagagccaccaccgacagcagcagcaccgccaaccugaacaacaucagcaucaccauccacagcgaguucuacaucauccccagaagccaggagagcaagugcaacgaguacaucaacaacggccuguga

SEQ ID NO: 477 - RNA, 666 nt, Artificial Sequence
  derived and/or modified CDS sequence (opt4) from RVA/Wa/P[8]__AAA66953.1__SP-IgE_P2_VP8*(41-223)
auggacuggaccuggauccuguuccugguggccgccgccaccagagugcacagccaguacaucaaggccaacagcaaguucaucggcaucaccgagcugggcagcggcagcggcgcccagaccagauacgcccccgugaacuggggccacggcgagaucaacgacagcaccaccguggagcccaugcuggacggccccuaccagcccaccaccuucaccccccccaacgacuacuggauccugaucaacagcaacaccaacggcgugguguacgagagcaccaacaacagcgacuucuggaccgccgugguggccaucgagccccacgugaaccccguggacagacaguacaccaucuucggcgagagcaagcaguucaacgugagcaacgacagcaacaaguggaaguuccuggagauguucagaagcagcagccagaacgaguucuacaacagaagaacccugaccagcgacaccagauucgugggcauccugaaguacggcggcagaguguggaccuuccacggcgagacccccagagccaccaccgacagcagcagcaccgccaaccugaacaacaucagcaucaccauccacagcgaguucuacaucauccccagaagccaggagagcaagugcaacgaguacaucaacaacggccuguga

SEQ ID NO: 478 - RNA, 2328 nt, Artificial Sequence
  derived and/or modified CDS sequence (opt5) from RVA/BE1058/P[4]__AEX30665.1__VP4
auggccagccugaucuacagacagcuccugaccaacuccuauucuguggaccuucacgaugagauugaacaaaucggcagcgagaagacacagaaugucacgguuaaccccgggccuuucgcucagacccgguacgccccggugaauuggggacauggcgaaauuaacgacuccacaaccguggagcccguccuggaugggccuuaucagcccacaaccuuuaaaccucccaaugacuacuggcuccugaucucuagcaacacagauggagugguuuaugaauccaccaauaacucugacuucuggacggcggugauugcugucgagccucacgugaaucaaaccaaccgccaguacguucuuuuuggcgagaauaagcaguucaacaucgaaaauagcuccgauaaauggaaguuuuucgagauguuuaaagggaacagccagucugacuucuccaauagacggacacugaccagcucuaaccgccucgugggaaugcugaaguauggcggcagagucuggacauuucauggggaaaccccgcgggccacgacagauuccagcucuaccgccgaccugaacaauaucuccauuaucauucacagcgaguucuacaucauuccccgcucccaagagucuaagugcaacgaauacaucaauaacggacucccucccauucagaauacaagaaacguggugccucugagccuuuccagccggucuauccaguaucgcagagcucaggucaaugaggauaucaccauuuccaaaaccagccuguggaaggaaaugcaauacaaccgggacaucauuauccgcuuuaaauucggcaauucuguuauuaagcucgggggacugggcuauaaauggagcgagaucuccuacaaggccgcuaacuaucaguacucuuauagcagagauggggaacaggugacagcccauacgaccuguuccgugaauggagucaacaauuuuagcuacaacggcggcucucuucccacagacuucuccaucagccgguacgaggugauuaaggaaaauucuuauguuuacaucgacuauugggaugacuccaaagcguuccgcaacaugguguacgucagaagccuggccgcuaaccucaauuccgugaagugcgccgggggaucuuaugauuuucggcugccgguuggcgaguggccuauuaugaacgggggagcugugagccugcacuucgccggcgucacccucuccacacaauuuaccgacuucgugucucugaauagccuuagauuucgcuucucccugacggucgaugagcccagcuuuucuaucauucggacaagaaccaugaaccucuacgggcugccugcggccaaucccaacaauggaaacgaauauuacgagguguccggccgcuucagccuuaucucucugguucccaccaaugacgauuaccagacaccuaucaugaacuccgugaccguccggcaggaccucgaaagacagcugaaugaucugcgcgaggaguuuaacagccucucucaagaaauugcuaugagccagcugaucgaccuugcccugcucccgcuggauauguucuccauguuuagcggcauuaaaucuacaaucgaccuuacgaaguccauggcuaccagcgugaugaaaaaguuccggaaauccaagcuggccacaucuauuagcgagaugaccaauucccucucugacgccgcuagcuccgcgucuagaagcgccuccauccgcagcaaccugucugcuauuuccaauuggagcgaugccucuaaguccguucugaacgugacagacagccucaacgaugucucuacccagacguccaccaucagcaaaaagcugcggcuuaaagaaaugaucacacagaccgaggggauuaauuuugacgauaucuccgccgcugugcugaagacaaaaauggacaugagcacccaaauuggaaagaacacgcuccccgauaucgugacagaagccucugagaaguucauuccuaaaagaagcuaucgcguucugaaggacgaugaggucauggaagugaauaccgagggcaaauucuuugcguacaagguggacacacugaacgaaauccccuucgauaucaauaaauuugcugagcuugucaccgacuccccugugauuucugccaucauugauuucaagacccucaagaaccugaaugacaacuaugggaucacacggauugaggcccuggaccucaucaaaagcaaucccaacguucugagaaauuuuaucaaccagaauaacccgauuauccggaaucgcauugaacagcuuauccugcaguguaagcucuga

SEQ ID NO: 479 - RNA, 2328 nt, Artificial Sequence
  derived and/or modified CDS sequence (opt5) from RVA/DS-1/P[4]__CAD62680.1__VP4
auggccagccugaucuacagacagcuccugaccaacuccuauucuguggaccuucacgaugagauugaacaaaucggcagcgagaagacacaguccgucacgguuaaucccgggccuuucgcucagacccgguacgccccggugaacuggggaucuugggaaauuaaugacagcacaaccguggagcccguccuggauggcccuuaucagcccacaaccuuuaagccucccaacgacuacuggcuccugaucuccucuaauacaaacggggugguuuaugaaagcaccaauaacaaugauuucuggacggcgguguccagcgucgagccucaugugucucaaaccaaccgccaguacauucuuuuuggagagaauaagcaguucaacguugaaaauaacuccgacaaauggaaguuuuucgagacauuuaccggcagcucucaggggaauuucuccaacagacggacacugaccagcucuaaccgccucgugggaaugcugaaauauggcggcagagucuggacguuucacggggaaacaccgcgggcuaccacagauuccagcaauaccgccgaccugaacaauaucuccaucauuauccauucugaguucuacauuaucccccgcagccaagaguccaagugcaacgaauacauuaauaacggacucccucccauccagaauaccagaaacguggugccucugagccuuucuucccggagcauucaguauaagcgcgcccaggucaaugaggauaucacaaucucuaaaacgagccuguggaaggaaaugcaauacaacagagacauuaucauucgguuuaaauucggcaauuccaucauuaagcucgggggacugggcuauaaauggucugagaucagcuacaaggcugccaacuaucaguacuccuauagccgcgauggggaacagguuaccgcucacacaaccuguucugugaauggagugaacaauuuuuccuacaacggcggcagccuucccacagacuucucuaucuccagauacgaggucauuaaggagaacagcuauguguacaucgauuauugggacgacuccaaagccuuccggaauaugguuuacgugcgcucucuggcggccaaccucaauagcgucaagugcaccgggggauccuauaacuuuagacugccggugggcaaauggccuauuauggaugggggagcuguuucucugcauuucgccggcgugacgcucagcacacaauuuaccgacuucgucucccugaauagccuucgguuuagauucucucugaccguggaugaacccuccuuuagcaucauucgcacacggaccaucaaccucuacgggcugccugcugccaaucccaacaauggaaacgaguauuacgaaaugucuggcagauucucccuuaucagccugguccagacaaaugacgauuaccagacgcccauuaugaacucugugaccguucgccaggaccucgagcggcaacugaaugaucugagagaagaguuuaacagccucucccaggagaucgcgaugagccagcugauugaccuugcccugcucccucuggauauguucucuauguuuuccggcaucaagagcacaauugaccuuaccaaauccauggcuacaucugugaugaagaaauuccgcaagagcaagcuggccaccuccaucucugaaaugacgaauagccucuccgaugcugccucuagcgccucccggagcgcuucuauuagauccaaccugagcaccaucucuaacuggacaaauaccuccaaaagcgucucuaacgugacagacuccguuaaugacgugagcacccagacguccacaaucagcaagaaacugcgccuccgggagaugauuacccaaacagaagggcugucuuuugaugacaucagcgcggccguccuuaagaccaaaauugauauguccacccagaucggaaagaacacacugccggacauugugacggaggcuucugaaaaguucauccccaaaagaagcuaucgcgugcucaaggaugacgagguuauggagaucaauaccgaaggcaaauucuuugccuacaaggucgauacacugaacgagauuccuuucgacaucaauaaauuugccgaacuggugaccgauucccccgugauuucugcuaucauugacuucaagacacuuaagaaccucaaugauaacuaugggaucacccggaucgaggccuuuaaucugauuaaaagcaacccuaauguccugagaaacuucaucaaucagaacaaccccauuauccggaaucgcauugagcagcucauccugcaauguaaacuuuga

SEQ ID NO: 480 - RNA, 2328 nt, Artificial Sequence; identical to SEQ ID NO: 479
  derived and/or modified CDS sequence (opt5) from RVA/DS-1/P[4]__ABV53252.1__VP4

SEQ ID NO: 481 - RNA, 2328 nt, Artificial Sequence
  derived and/or modified CDS sequence (opt5) from RVA/F01322/P[6]__AFA51886.1__VP4
auggccagccugaucuacagacagcuccugaccaacuccuauacaguggagcuuucugacgaaauuaauacgaucggcagcgagaagaaccaaaaugucaccauuaaccccgggccuuucgcucagacaaauuacgccccgguuaccuggucccacggagaagugaacgauucuacaaccaucgagcccgugcuggacggcccuuaucagcccacaaauuuuaaaccucccaacgauuacuggauucuccugaauccuaccaaccagcaagucgugcuugaagggacgaauaagaccgacaucuggguugcgcugcuccugguggagccgaacgucacaaaucagagccggcaguauacccuguucggagagacaaaacagaucaccguggaaaacaauacgaacaaguggaaauuuuucgagauguuucgcuccucuguuagcgcugaguuccaacauaagagaacacucaccuccgauacaaagcuggccggcuuuaugaaauucuacaacagcguguggaccuuucacggggaaacccccaaugccacaacggacuauucuuccaccagcaaccuuuucgaggucgaaacagugauucauguggaguuuuacaucauuccucggucucaggaauccaagugcagcgaguacaucaauaccggacugcccccuaugcagaacacacgcaauauuguccccguugcucucucuuccagaagcgugaccuaucagcgggcccaagugaacgaagauaucauuaucuccaaaacgucucuguggaaggagaugcaguacaaucgcgacaucauuaucagauucaaauuuaacaauagcauugucaagcugggcggccugggguauaagugguccgagaucagcuucaaagcugccaacuaccaguauaauuaccuccgggauggagaacaagugacagcgcacaccaccuguucuguuaacggcgugaauaacuucuccuauaaugggggaagccugccgacagacuuuucugucagccgcuacgaggugauuaaggaaaacuccuacguuuauguggauuacugggacgauucucaggccuucagaaacauggucuaugugcggagccuggcugccaaucucaacuccgucaaaugcagcggcgggaauuacaacuuucagaucccugugggagcuuggcccguuaugucuggcggcgccgugucccugcauuucgcgggggucacccuuagcacacaguuuacggacuucgugucucuuaauucccuccgcuuuagauucagccugaccguugaggaaccucccuuuuccauccuucggacacgcgugucuggacuguauggccuccccgccuucgacccuaacaaugggcacgaguacuaugagauuaacggaagauuuagccugaucucccuggucccgucuaaugaugacuaccaaacccccauuaugaacagcgugacagugcggcaggaucucgaaagacagcugggcgaccuucgcgaggaguucaauucccugagccaggaaaucgcuaugacccaacucauugaucuggcccuucugccucucgacauguuuucuauguucuccgggaucaagagcacgaucgaugcugccaaaucuauggccaccaagguuaugaaaaaguucaagaaauccggacuggcuacaagcauuucugaacugaccggcagccucuccaacgcggccagcucugucucccggaauagcuccaucagaucuaacauuagcuccaucucuguguggacagacgugagcgagcagauugcuggcaccuccgauucuguccgcaauaucagcacgcagacauccgccauuagcaagaaacugcggcuuagagagaucaccacacagaccgaagggaugaacuuugacgauaucucugccgcugugcugaagaccaaaauugacaaguccacacacaucagccccgacacgcucccugauauuaucaccgagucuuccgaaaaguucauucccaaacgcgccuaccggguucugaaggacgaugaggugauggaggcggacgucgauggaaaauuuuucgcuuauaagguggacacauuugaagagguuccguucgauguggacaaauuugucgaucuggugaccgacagcccuguuaucucugccaucauugauuucaagacacuuaagaaccucaaugacaacuacggcaucaccagaucccaagcccuggaucugauucgcagcgacccccgggugcucagagacuuuaucaaucagaacaauccuauuaucaaaaaccgcaucgaacagcugauucuucagugucggcuguga

SEQ ID NO: 482 - RNA, 2328 nt, Artificial Sequence
  derived and/or modified CDS sequence (opt5) from RVA/1076/P[6]__AAA47337.1__VP4
auggccagccugaucuacagacagcuccugaccaacuccuauacaguggagcuuucugacgaaauuaauacgaucggcagcgagaagucccaaaacgucaccauuaaucccgggccuuucgcucagacaaacuacgccccgguuaccuggucucacggagaagugaaugauagcacaaccaucgagcccgugcuggacggcccuuaucagcccacauccuuuaaaccucccucugauuacuggauucuccugaacccuaccaaucagcaagucgugcuugaagggacgaacaagaccgacaucuggguugcgcugcuccugguggagccgaaugucacaaaccagagccggcaguauacccuguucggagagacaaaacagaucaccguggaaaauaacacgaauaaguggaaauuuuucgagauguuucgcuccagcguuucugcugaguuccaacauaagagaacacucaccuccgauacaaagcuggccggcuuucuuaaauucuacaacagcguguggaccuuuuauggggagacaccccacgccaccacggacuacucuuccaccagcaaucugucugaggucgaaacagcuauucauguggaguucuacaucauuccucggucccaggaaagcaagugcaacgaguauaucaacaccggacugcccccuaugcagaauacacgcaacauugugcccgucgcccucuccucuagaagcguuaccuaccagcgggcucaagugaaugaagauaucauuaucuccaaaacgagccuuuggaaggagaugcaguauaaccgcgacaucauuaucagauuuaaauucaauaacucuauugugaagcugggcggccucggguacaaguggccggagaucuccuuuaaagccgcgaauuaucaguacaacuaucugcgggauggagaacaagucauggcccacacaaccuguagcgugaauggcgagaacaauuacucuuacaacgggggacugcucccuacccauuucagcguuucccgcuaugaagugauuaaggaaaauucuuacgucuaugacaacuacugggaugacagccaggcuuucagaaauaugguguauguucggucccuggccgcuaaccuuaacagcgugaaaugcucuggcgggaauuacaacuuucagaugcccgucggagccuggccugugauguccggcggcgcggucagccugcacuucgccggggugacacucucuaccgaauuuacagauuucguuucccugaauagccuucgcuuuagauucucccugacgguggaggagccucccuuuucuauccuccggacccgcgucagcggacuguauggccugcccgcuuucaacccgaauaacgggcacgaauacuacgagaucgccggaagauuuuccuucauucuccuggugcccucuaaugacgacuaucagacaccuaucaugaacagcguuaccgugcggcaagaucuugaaagacagcugggcgaccuccgcgaggaauuuaauucccugagccaggagauugcuaugacacagcuuaucgaucuggcccuccugccccuggacauguucucuauguuuuccgggauuaagagcaccaucgaugccgcuaaaucuauggcgacgauggucaugaagaaauucaagaaguccggacucgccaccagcaucucugagcugacacggagccuuuccaacgcugccagcucuguguccagaagcuccucuauuaaaagcaauaucuccucuauuagcguguggaccgacguuuccgaacaaaucacaggcucuagcgauuccguccgcaacauuagcacccagacgucugccaucuccaagcggcugagacuccgcgagauuacaacccagacagaaggcaugaauuucaucgacaucagcgcugccgugcugaaaaccaagauugauaaaucuacccauaucuccccugacacacugcccgauauuaucacggagagcucugagaaguuucuuccgaagcgggcguacagagugcucaaagacgacgaagucauggagguggauguugacgggaaguucuuugcuuauaaaguggauaccuucgaagaggucccuuuugacguggauaaguucguugaccuggugacagauucccccgucauuagcgccaucaucgacuuuaaaacccugaagaaccucaaugauaacuacggaauuacacgcucccaggcccuggaccuuauccggagcgauccuagagugcugcgcgacuucauuaaccaaaauaaccccaucauuaagaaucggaucgaacagcucauccugcaguguagacuguga

SEQ ID NO: 483 - RNA, 2328 nt, Artificial Sequence
  derived and/or modified CDS sequence (opt5) from RVA/BE1128/P[8]__AEX30671.1__VP4
auggccagccugaucuacagacagcuccugaccaacuccuauucuguggaccuucacgaugagauugaacaaaucggcagcgagaagacacagaaugucacgguuaaccccgggccuuucgcucagacccgguacgccccggugaauuggggacauggcgaaauuaacgacuccacaaccguggagcccauccuggaugggccuuaucagcccacaaccuuuacaccucccaccgacuacuggauucucaucacgucuaauaccaacggagucguguaugaaagcacaaauaacuccgauuucuggaccgcgguuaucgcuguggagccucacgucaauccgguggaccgccaauacaacguuuuuggcgagaauaaacaguucaacgugagaaaugauucugacaaguggaaauuucuggaaauguuccgggggagcucccagaacgauuuuuauaaucgcagaacacuuaccagcgacacgcggcuggucggcauucucaaguacggaggccgcguguggacauuccauggggagacccccagagccacaaccgauucuuccaacaccgccaaccuggacggaaucagcauuacaauccacucugaauuuuacauuaucccucggucccaggagagcaaaugcaaugaguauauuaacaauggccugcccccuauccaaaacacgcgcaauguggucccccucucucuguccagcagauccauccaguacaagcgggcucagguuaacgaagauauuaccaucucuaagacaagccuuuggaaagagaugcaguauaaucgcgacauuaucauuagauucaaguuugggaacuccaucgugaaacugggaggccucggguacaaguggagcgaaaucucuuauaaagccgcuaauuaccaauauaacuaccugcgggacggagaacaggugaccgcccauacaaccuguuccgucaauggcgugaacaauuucagcuacaacggcgggucucuuccgacggauuuuagcguuucccgcuaugaagugauuaaggagaauagcuacgucuauguggacuacugggaugacagcaaggcguucagaaacaugguuuaugugcggucccuggccgcuaaccucaauagcgucaaaugcacaggaggcucuuacgauuucuccaucccugugggggccuggcccgucaugaacggaggcgcugugagccugcacuuugccgggguuacccugucuacccaguucacagacuuugugucccucaauagccugagauuccgcuuuucccuuaccgucgaugagccuucuuucagcauucugcggacaagaacggugaaccucuauggacugcccgcggccaaucccaacaauggcaacgaauacuacgagaucuccggccgcuuuucucuuauuagccugguuccuaccaaugacgauuaucaaacaccgaucaugaacuccgugaccguccggcaggaccucgaaagacagcugacagaucugcgcgaggaguucaauagccucucucaggagaucgcuaugucccaacugauugaccuugcccugcucccccuggacauguuuagcauguucucugggaucaaguccaccauugaucuuacgaaaagcauggcuaccucugugaugaagaaauuucggaagucuaaacuggccacauccgugagcgagaugaccaacucucucuccgacgccgcuagcuccgcgucuagaagcguuuccguccgcucuaauaucagcgccguguccaacuggacaaaugugucuaacgaugucagcaacgugaccaauuccguuaacgacauuagcacgcagacaucuaccaucuccaagaaucugcggcugaaggaaaugauuacacagaccgagggaaugagcuucgaugacaucucugcugccgugcucaaaaccaagaucgauauguccacacagauuggcaaaaacacgcugccugacaucgucaccgaagccagcgagaaguuuauucccaaaagaucuuaccgcauccuuaaggaugacgaagugauggagauuaauacagaggggaaguucuucgcuuauaaaaucgauacccugaacgaaguuccuuuugacgugaauaaguucacagagcucgucaccaacucccccgugaucagcgccauuaucgauuuuaaaacgcugaagaaucugaacgacaauuacggaauuacacggaccgaagcgcuuaaccucaucaaauccaauccgaacguucugagaaauuucauuaaccaaaacaauccuaucauccggaaccgcauugagcagcugauccuccaguguaagcuguga

SEQ ID NO: 484 - RNA, 2328 nt, Artificial Sequence
  derived and/or modified CDS sequence (opt5) from RVA/Wa-VirWa/P[8]__ACR22783.1__VP4
auggccagccugaucuacagacagcuccugaccaacuccuauucuguggaccuucacgaugagauugaacaaaucggcagcgagaagacacagaaugucacgauuaaccccuccccuuucgcucagacccgguacgccccgguuaauugggggcauggagaaaucaacgacucuacaaccguggagcccauucuggauggcccuuaucagcccacaaccuuuacaccucccaaugacuacuggauccucaucaacagcaauaccaacgggguggucuaugaauccacgaauaacucugauuucuggaccgcggugguugcuauugagccucacgugaauccggucgaccgccaauacacaaucuuuggagagagcaaacaguucaacgugagaaaugauuccaacaaguggaaauuucuggaaauguuccgguccucuucccagaaugaguuuuauaaccgcagaacccuuacaagcgacacccggcugguuggcauucucaaguacgggggacgcguguggacguuccauggcgaaacacccagagccaccacagauucuuccagcaccgccaaccugaauaacaucucuauuaccauccacuccgaguuuuacauuaucccucggagccaggaguccaaaugcaaugaauauaucaacaauggccugcccccuauucaaaacacacgcaaugucgugccccucccgcugucuagcagauccauccaguacaagcgggcucaggugaacgaggacauuaucgucagcaagacgucucuuuggaaagaaaugcaguauaaucgcgauauuaucaucagauucaaguuugggaacuccauuguuaaaaugggaggccugggguacaaguggagcgagaucucuuauaaagccgcuaauuaccaauauaacuaccuccgggacggagaacaggugaccgcccauacaaccuguagcgugaauggcgucaacaauuucuccuacaacgggggaucucugccuacagauuuuggcauuagccgcuaugaggugaucaaggagaacuccuacguuuauguggacuacugggacgauagcaaggcguucagaaauauggucuaugugcggucucuugccgcuaaccugaauagcguuaaaugcaccggcgggagcuacgacuucucuauucccgugggagccuggccugucaugaacggcggggcugugucccuccacuuugccggagucacgcugagcacacaguucaccgauuuugugucccuuaauucucucagauuccgcuuuagccugaccguugacgaaccucccuucuccauccuucggacaagaaccgugaaccuguauggccuccccgcggccaauccgaacaaugggaacgaguacuacgaaaucucuggacgcuuuagccugauuucccuuguccccacaaaugaugacuaucaaacgccuaucaugaacagcgugaccguucggcaggaucuggagagacagcucacagaccugcgcgaagaguucaauucucugucccaggagauugcuauggcccaacucaucgaucuggcucugcugccccucgacauguuuagcauguucucuggcauuaaguccaccaucgaucugacaaaaagcauggccaccucugugaugaagaaauuuagaaagagcaaacuugccacguccauuagcgaaaugaccaacucucuguccgacgcugcgagcuccgccucucggaaugucagcauccgcuccaaccucucugcuaucagcaacuggacaaauguguccaacgacgugucuaauguuaccaacagccugaaugauauuuccacacagaccagcacgaucucuaagaagcugcggcucaaagagaugauuacacagaccgaaggcauguccuucgacgauaucagcgccgccguccugaagacaaaaauugacaugucuacccagaucgggaagaacacccuuccugauaucgugacagaggcuuccgaaaaauuuauucccaagagaagcuaccgcauccugaaggacgaugaggugauggagauuaauacggaaggaaaauucuucgccuauaagaucaacaccuuugacgaggucccguucgaugugaauaaauuugcggaacucguuacagacucuccugugauuuccgcuaucaucgauuucaagacccugaaaaaccugaaugacaacuacggcauuacacggaccgaggcccuuaaucucaucaagagcaaccccaauaugcugagaaacuuuauuaaccaaaauaacccuaucauucggaaucgcaucgagcagcugauccuccaguguaagcuguga

SEQ ID NO: 485 - RNA, 2328 nt, Artificial Sequence
  derived and/or modified CDS sequence (opt5) from RVA/Wa/P[8]__AAA47290.1__VP4
auggccagccugaucuacagacagcuccugaccaacuccuauucuguggaccuucacgaugagauugaacaaaucggcagcgagaagacacagaaugucacgauuaaccccuccccuuucgcucagacccgguacgccccgguuaauugggggcauggagaaaucaacgacucuacaaccguggagcccauucuggauggcccuuaucagcccacaaccuuuacaccucccaaugacuacuggauccucaucaacagcaauaccaacgggguggucuaugaauccacgaauaacucugauuucuggaccgcggugguugcuauugagccucacgugaauccggucgaccgccaauacacaaucuuuggagagagcaaacaguucaacguguccaaugauagcaacaaguggaaauuucuggaaauguucagaucuuccagccagaaugaguuuuauaaccggcgcacccuuacaucugacaccagauucguuggcauucugaaguacgggggacggguguggacguuucauggcgaaacaccccgcgccaccacagauuccagcucuaccgccaaccucaauaacaucuccauuaccauccacagcgaguucuacauuaucccuagaucccaggagucuaaaugcaaugaauauaucaacaauggccugcccccuauucaaaacacacggaaugucgugccccugccgcucagcucccgcagcauccaguacaagagagcucaggugaacgaggacauuaucgucucuaagacgucccuguggaaagaaaugcaguauaaucgggauauuaucauccgcuuuaaguucgggaacagcauuguuaaaaugggaggccuuggguacaaguggucugagaucagcuauaaagccgcuaauuaccaauauaacuaccugagagacggagaacaggugaccgcccauacaaccuguuccgugaauggcgucaacaauuuuucuuacaacgggggaagccucccuacagauuucggcauuucccgguaugaggugaucaaggagaacagcuacguuuauguggacuacugggacgauucuaaggcguuccgcaauauggucuaugugagaucccuggccgcuaaccuuaauagcguuaaaugcaccggcgggucuuacaacuuuucccugcccgugggagccuggccugucaugaauggcggggcugugagccuccacuucgccggagucacgcuguccacacaguuuaccgacuucgugucucugaacagccuccgguuuagauucucccugaccguugaugaaccucccuuuucuauucuucgcacacggaccgugaaucuguauggccuccccgcggccaacccgaauaacgggaaugaguacuacgaaaucagcggaagauucucccugaucuaucuuguccccacaaacgacgauuaccaaacgccuauuaugaauagcgugaccguucgccaggaccuggagcggcagcucacagaucugagagaagaguuuaacucucugucccaggagaucgcuauggcccaacucauugaccuggcccuucugccccucggcauguucagcauguuuucuggcaucaaguccaccauugaucugacaaaaagcauggcuaccucugugaugaagaaauuccgcaagagcaaacuugccacguccaucagcgaaaugaccaauucucuguccgacgcugcgagcuccgccucucggaacgucagcauuagauccaaccucucugcuaucagcaauuggacaaacguguccaaugaugugucuaacguuaccaauagccugaacgacaucuccacacagaccagcacgauuucuaagaaguuucgccugaaagagaugaucacacagaccgaagggauguccuucgacgauauuagcgccgccguccucaagacaaaaaucgacaugucuacccagauuggaaagaauacccugccugauaucgugacagaggcuuccgaaaaauucauccccaagcggagcuaucgcauucuuaaggacgaugaggugauggagaucaacacggaaggcaaauuuuucgccuacaagauuaauaccuuugacgaggucccguucgaugugaacaaauuugcggaacugguuacagacucuccugugaucuccgcuauuaucgauuucaagacccucaaaaaucugaacgacaauuaugggaucacaagaaccgaggcccugaaccuuauuaagagcaaucccaacaugcuccggaacuuuaucaaucaaaacaauccuauuaucagaaaccggauugagcagcugauccugcaguguaagcucuga

SEQ ID NO: 486 - RNA, 2328 nt, Artificial Sequence
  derived and/or modified CDS sequence (opt5) from RVA/Wa/P[8]__AAA66953.1__VP4
auggccagccugaucuacagacagcuccugaccaacuccuauucuguggaccuucacgaugagauugaacaaaucggcagcgagaagacacagaaugucacgauuaaccccuccccuuucgcucagacccgguacgccccgguuaauugggggcauggagaaaucaacgacucuacaaccguggagcccaugcuggauggcccuuaucagcccacaaccuuuacaccucccaaugacuacuggauucucaucaacagcaauaccaacgggguggucuaugaauccacgaauaacucugauuucuggaccgcggugguugcuaucgagccucacgugaauccggucgaccgccaauacacaauuuuuggagagagcaaacaguucaacguguccaaugauagcaacaaguggaaauuucuggaaauguucagaucuuccagccagaaugaguuuuauaaccggcgcacccuuacaucugacaccagauucguuggcauccugaaguacgggggacggguguggacguuucauggcgaaacaccccgcgccaccacagauuccagcucuaccgccaaccucaauaacauuuccaucaccauucacagcgaguucuacaucauuccuagaucccaggagucuaaaugcaaugaauauaucaacaauggccugcccccuauccaaaacacacggaaugucgugccccugccgcucagcucccgcagcauucaguacaagagagcucaggugaacgaggacaucauugucucuaagacgucccuguggaaagaaaugcaguauaaucgggauaucauuauccgcuuuaaguucgggaacagcaucguuaaaaugggaggccuuggguacaaguggucugagauuagcuauaaagccgcuaauuaccaauauaacuaccugagagacggagaacaggugaccgcccauacaaccuguuccgugaauggcgucaacaauuuuucuuacaacgggggauuccucccuacagauuucggcaucagccgguaugaggugauuaaggagaacuccuacguuuauguggacuacugggacgauagcaaggcguuucgcaauauggucuaugugagaucucuggccgcuaaccuuaauuccguuaaaugcaccggcgggagcuacaacuucucuauccccgugggagccuggccugucaugaauggcggggcugugucccugcacuuugccggagucacgcucagcacacaguucaccgacuuugugucccugaacucucugcgguucagauuuagccucaccguugaugaaccucccuucuccauucugcgcacacggaccgugaaucuuuauggccugcccgcggccaacccgaauaacgggaaugaguacuacgaaaucucuggaagauuuagccucaucuaucugguccccacaaacgacgauuaccaaacgccuauuaugaacuccgugaccguucgccaggaccuugagcggcagcugacagaucucagagaagaguucaauagccugucucaggagaucgcuauggcccaacugauugaccucgcucugcuuccccuggauauguuuuccauguucagcggcaucaagucuaccauugaccucacaaaauccauggccaccagcgugaugaagaaauuucgcaagucuaaacuggccacgagcaucuccgaaaugaccaauagccuuucugaugcugcguccagcgccucccggaacgucucuauuagaagcaaccuguccgcuaucucuaauuggacaaacgugagcaaugacguguccaacguuaccaauucucucaacgacaucagcacacagaccuccacgauuagcaagaaguuccgccugaaagagaugaucacacagaccgaaggcaugucuuucgaugacauuuccgccgccguccugaagacaaaaaucgauaugagcacccagauugggaagaauacccucccugacaucgugacagaggcuucugaaaaauuuauccccaagcgguccuaucgcauucugaaggaugacgaggugauggagaucaacacggaaggaaaauucuuugccuacaagauuaauaccuucgaugaggucccguuugacgugaacaaauucgcggaacuuguuacagauagcccugugaucucugcuauuaucgacuuuaagacccugaaaaaucucaacgauaauuauggcaucacaagaaccgaggcccugaaccugauuaaguccaaucccaacaugcuucggaacuucaucaaucaaaacaauccuauuaucagaaaccggauugagcagcucauccugcaguguaagcuguga

SEQ ID NO: 487 - RNA, 720 nt, Artificial Sequence
  derived and/or modified CDS sequence (opt5) from RVA/BE1058/P[4]__AEX30665.1__VP8*
auggccagccugaucuacagacagcuccugaccaacuccuauucuguggaccuucacgaugagauugaacaaaucggcagcgagaagacacagaaugucacgguuaaccccgggccuuucgcucagacccgguacgccccggugaauuggggacauggcgaaauuaacgacuccacaaccguggagcccguccuggaugggccuuaucagcccacaaccuuuaaaccucccaaugacuacuggcuccugaucucuagcaacacagauggagugguuuaugaauccaccaauaacucugacuucuggacggcggugauugcugucgagccucacgugaaucaaaccaaccgccaguacguucuuuuuggcgagaauaagcaguucaacaucgaaaauagcuccgauaaauggaaguuuuucgagauguuuaaagggaacagccagucugacuucuccaauagacggacacugaccagcucuaaccgccucgugggaaugcugaaguauggcggcagagucuggacauuucauggggaaaccccgcgggccacgacagauuccagcucuaccgccgaccugaacaauaucuccauuaucauucacagcgaguucuacaucauuccccgcucccaagagucuaagugcaacgaauacaucaauaacggacucccucccauucagaauacaagaaacguggugccucugagccuuuccagccgg

SEQ ID NO: 488 - RNA, 720 nt, Artificial Sequence
  derived and/or modified CDS sequence (opt5) from RVA/DS-1/P[4]__CAD62680.1__VP8*
auggccagccugaucuacagacagcuccugaccaacuccuauucuguggaccuucacgaugagauugaacaaaucggcagcgagaagacacaguccgucacgguuaaucccgggccuuucgcucagacccgguacgccccggugaacuggggaucuugggaaauuaaugacagcacaaccguggagcccguccuggauggcccuuaucagcccacaaccuuuaaaccucccaacgacuacuggcuccugaucuccucuaauacaaacggggugguuuaugaaagcaccaauaacaaugauuucuggacggcgguguccagcgucgagccucaugugucucaaaccaaccgccaguacauucuuuuuggagagaauaagcaguucaacguugaaaauaacuccgacaaauggaaguuuuucgagacauuuaccggcagcucucaggggaauuucuccaacagacggacacugaccagcucuaaccgccucgugggaaugcugaaauauggcggcagagucuggacguuucacggggaaacaccgcgggcuaccacagauuccagcaauaccgccgaccugaacaauaucuccaucauuauccauucugaguucuacauuaucccccgcagccaagaguccaagugcaacgaauacauuaauaacggacucccucccauccagaauaccagaaacguggugccucugagccuuucuucccgg

SEQ ID NO: 489 - RNA, 720 nt, Artificial Sequence; identical to SEQ ID NO: 488
  derived and/or modified CDS sequence (opt5) from RVA/DS-1/P[4]__ABV53252.1__VP8*

SEQ ID NO: 490 - RNA, 720 nt, Artificial Sequence
  derived and/or modified CDS sequence (opt5) from RVA/F01322/P[6]__AFA51886.1__VP8*
auggccagccugaucuacagacagcuccugaccaacuccuauacaguggagcuuucugacgaaauuaauacgaucggcagcgagaagaaccaaaaugucaccauuaaccccgggccuuucgcucagacaaauuacgccccgguuaccuggucccacggagaagugaacgauucuacaaccaucgagcccgugcuggacggcccuuaucagcccacaaauuuuaaaccucccaacgauuacuggauucuccugaauccuaccaaccagcaagucgugcuugaagggacgaauaagaccgacaucuggguugcgcugcuccugguggagccgaacgucacaaaucagagccggcaguauacccuguucggagagacaaaacagaucaccguggaaaacaauacgaacaaguggaaauuuuucgagauguuucgcuccucuguuagcgcugaguuccaacauaagagaacacucaccuccgauacaaagcuggccggcuuuaugaaauucuacaacagcguguggaccuuucacggggaaacccccaaugccacaacggacuauucuuccaccagcaaccuuuucgaggucgaaacagugauucauguggaguuuuacaucauuccucggucucaggaauccaagugcagcgaguacaucaauaccggacugcccccuaugcagaacacacgcaauauuguccccguugcucucucuuccaga

SEQ ID NO: 491 - RNA, 720 nt, Artificial Sequence
  derived and/or modified CDS sequence (opt5) from RVA/1076/P[6]__AAA47337.1__VP8*
auggccagccugaucuacagacagcuccugaccaacuccuauacaguggagcuuucugacgaaauuaauacgaucggcagcgagaagucccaaaacgucaccauuaaucccgggccuuucgcucagacaaacuacgccccgguuaccuggucucacggagaagugaaugauagcacaaccaucgagcccgugcuggacggcccuuaucagcccacauccuuuaaaccucccucugauuacuggauucuccugaacccuaccaaucagcaagucgugcuugaagggacgaacaagaccgacaucuggguugcgcugcuccugguggagccgaaugucacaaaccagagccggcaguauacccuguucggagagacaaaacagaucaccguggaaaauaacacgaauaaguggaaauuuuucgagauguuucgcuccagcguuucugcugaguuccaacauaagagaacacucaccuccgauacaaagcuggccggcuuucuuaaauucuacaacagcguguggaccuuuuauggggaaacaccccacgccaccacggacuacucuuccaccagcaaucugucugaggucgaaacagcuauucauguggaguucuacaucauuccucggucccaggaaagcaagugcaacgaguauaucaacaccggacugcccccuaugcagaauacacgcaacauugugcccgucgcccucuccucuaga

SEQ ID NO: 492 - RNA, 720 nt, Artificial Sequence
  derived and/or modified CDS sequence (opt5) from RVA/BE1128/P[8]__AEX30671.1__VP8*
auggccagccugaucuacagacagcuccugaccaacuccuauucuguggaccuucacgaugagauugaacaaaucggcagcgagaagacacagaaugucacgguuaaccccgggccuuucgcucagacccgguacgccccggugaauuggggacauggcgaaauuaacgacuccacaaccguggagcccauccuggaugggccuuaucagcccacaaccuuuacaccucccaccgacuacuggauucucaucacgucuaauaccaacggagucguguaugaaagcacaaauaacuccgauuucuggaccgcgguuaucgcuguggagccucacgucaauccgguggaccgccaauacaacguuuuuggcgagaauaaacaguucaacgugagaaaugauucugacaaguggaaauuucuggaaauguuccgggggagcucccagaacgauuuuuauaaucgcagaacacuuaccagcgacacgcggcuggucggcauucucaaguacggaggccgcguguggacauuccauggggagacccccagagccacaaccgauucuuccaacaccgccaaccuggacggaaucagcauuacaauccacucugaauuuuacauuaucccucggucccaggagagcaaaugcaaugaguauauuaacaauggccugcccccuauccaaaacacgcgcaauguggucccccucucucuguccagcaga

SEQ ID NO: 493 - RNA, 720 nt, Artificial Sequence
  derived and/or modified CDS sequence (opt5) from RVA/Wa-VirWa/P[8]__ACR22783.1__VP8*
auggccagccugaucuacagacagcuccugaccaacuccuauucuguggaccuucacgaugagauugaacaaaucggcagcgagaagacacagaaugucacgauuaaccccuccccuuucgcucagacccgguacgccccgguuaauugggggcauggagaaaucaacgacucuacaaccguggagcccauucuggauggcccuuaucagcccacaaccuuuacaccucccaaugacuacuggauccucaucaacagcaauaccaacgggguggucuaugaauccacgaauaacucugauuucuggaccgcggugguugcuauugagccucacgugaauccggucgaccgccaauacacaaucuuuggagagagcaaacaguucaacgugagaaaugauuccaacaaguggaaauuucuggaaauguuccggucuagcucccagaaugaguuuuauaaccgcagaacccuuacaagcgacacccggcugguuggcauucucaaguacgggggacgcguguggacguuccauggcgaaacacccagagccaccacagauucuuccagcaccgccaaccugaauaacaucucuauuaccauccacuccgaguuuuacauuaucccucggagccaggaguccaaaugcaaugaauauaucaacaauggccugcccccuauucaaaacacacgcaaugucgugccccucccgcugucuagcaga

SEQ ID NO: 494 - RNA, 720 nt, Artificial Sequence
  derived and/or modified CDS sequence (opt5) from RVA/Wa/P[8]__AAA47290.1__VP8*
auggccagccugaucuacagacagcuccugaccaacuccuauucuguggaccuucacgaugagauugaacaaaucggcagcgagaagacacagaaugucacgauuaaccccuccccuuucgcucagacccgguacgccccgguuaauugggggcauggagaaaucaacgacucuacaaccguggagcccauucuggauggcccuuaucagcccacaaccuuuacaccucccaaugacuacuggauccucaucaacagcaauaccaacgggguggucuaugaauccacgaauaacucugauuucuggaccgcggugguugcuauugagccucacgugaauccggucgaccgccaauacacaaucuuuggagagagcaaacaguucaacguguccaaugauagcaacaaguggaaauuucuggaaauguucagaucuuccagccagaaugaguuuuauaaccggcgcacccuuacaucugacaccagauucguuggcauucugaaguacgggggacggguguggacguuucauggcgaaacaccccgcgccaccacagauuccagcucuaccgccaaccucaauaacaucuccauuaccauccacagcgaguucuacauuaucccuagaucccaggagucuaaaugcaaugaauauaucaacaauggccugcccccuauucaaaacacacggaaugucgugccccugccgcucagcucccgc

SEQ ID NO: 495 - RNA, 720 nt, Artificial Sequence
  derived and/or modified CDS sequence (opt5) from RVA/Wa/P[8]__AAA66953.1__VP8*
auggccagccugaucuacagacagcuccugaccaacuccuauucuguggaccuucacgaugagauugaacaaaucggcagcgagaagacacagaaugucacgauuaaccccuccccuuucgcucagacccgguacgccccgguuaauugggggcauggagaaaucaacgacucuacaaccguggagcccaugcuggauggcccuuaucagcccacaaccuuuacaccucccaaugacuacuggauucucaucaacagcaauaccaacgggguggucuaugaauccacgaauaacucugauuucuggaccgcggugguugcuaucgagccucacgugaauccggucgaccgccaauacacaauuuuuggagagagcaaacaguucaacguguccaaugauagcaacaaguggaaauuucuggaaauguucagaucuuccagccagaaugaguuuuauaaccggcgcacccuuacaucugacaccagauucguuggcauccugaaguacgggggacggguguggacguuucauggcgaaacaccccgcgccaccacagauuccagcucuaccgccaaccucaauaacauuuccaucaccauucacagcgaguucuacaucauuccuagaucccaggagucuaaaugcaaugaauauaucaacaauggccugcccccuauccaaaacacacggaaugucgugccccugccgcucagcucccgc

SEQ ID NO: 496 - RNA, 477 nt, Artificial Sequence
  derived and/or modified CDS sequence (opt5) from RVA/BE1058/P[4]__AEX30665.1__VP8*(65-223)
cuggacggccccuaccagccuaccacauucaagccgcccaacgauuauuggcuccugaucagcuccaauacggacgggguggucuacgagucuaccaacaauagcgauuuuuggacagccguuauugcuguggaaccucacgugaaccaaaccaauagacaguauguccuuuucggagagaacaaacaguuuaauaucgaaaacuccucugacaaguggaaauucuuugagauguucaagggcaauagccaguccgauuuuucuaaccggcgcacacugaccagcuccaauagacucguggggaugcugaaauacggaggccggguuuggacauuccauggggaaacgccccgcgccaccaccgacucuagcuccacagcggaucuuaacaauauuagcaucauuauccacucugaguuuuauaucauuccuagaucccaagagagcaagugcaacgaauacaucaauaacggacug

SEQ ID NO: 497 - RNA, 477 nt, Artificial Sequence
  derived and/or modified CDS sequence (opt5) from RVA/DS-1/P[4]__CAD62680.1__VP8*(65-223)
cuggacggccccuaccagccuaccacauucaagccgcccaacgauuauuggcuccugaucagcuccaauacgaacgggguggucuacgagucuaccaauaacaaugacuuuuggacagccguuagcuccguggaaccucacgugucucaaaccaacagacaguauauucuuuucggagagaauaaacaguuuaacgucgaaaauaacagcgauaaguggaaauucuuugagacauucaccggcuccucucaggggaauuuuagcaaccggcgcacacugaccuccagcaauagacucgugggaaugcugaaguacggcgggcggguuuggacguuccauggagaaacaccccgcgcuaccaccgacucuuccaacacagccgaucuuaauaacaucagcauuaucauucacucugaguuuuauaucaucccuagaucccaagagagcaaaugcaacgaauacauuaauaacggccug

SEQ ID NO: 498 - RNA, 477 nt, Artificial Sequence; identical to SEQ ID NO: 497
  derived and/or modified CDS sequence (opt5) from RVA/DS-1/P[4]__ABV53252.1__VP8*(65-223)

SEQ ID NO: 499 - RNA, 477 nt, Artificial Sequence
  derived and/or modified CDS sequence (opt5) from RVA/F01322/P[6]__AFA51886.1__VP8*(65-223)
cuggacggccccuaccagccuaccaacuucaagccgcccaaugauuauuggauccuccugaacccuacaaaucaacaggugguccuugaggggacgaacaaaaccgacauuuggguugcccugcuccugguggaacccaaugugacaaaccagagcagacaguacacccuuuuuggagagacaaagcaaaucaccgucgaaaauaacacaaauaaauggaaguucuuugagauguuccgguccucugugagcgcugaauuucagcacaaacgcacccugacguccgauaccaagcucgccggcuucaugaaguuuuauaacucuguuuggacauuccauggggagaccccuaaugcgacaaccgacuacagcuccacgucuaaccuguuugagguggaaacagucauucacguggaguucuauaucauucccagaagccaggaauccaaaugcagcgaguacaucaauaccggacug

SEQ ID NO: 500 - RNA, 477 nt, Artificial Sequence
  derived and/or modified CDS sequence (opt5) from RVA/1076/P[6]__AAA47337.1__VP8*(65-223)
cuggacggccccuaccagccuaccagcuucaagccgcccuccgauuauuggauccuccugaacccuacaaaucaacaggugguccuugaggggacgaacaaaaccgacauuuggguugcccugcuccugguggaacccaaugugacaaaccagucuagacaguacacccuuuuuggagagacaaagcaaaucaccgucgaaaauaacacaaauaaauggaaguucuuugagauguuccggagcuccgugucugcugaauuucagcacaaacgcacccugacgagcgauaccaagcucgccggcuuccugaaguuuuauaacuccguuuggacauucuacggggagaccccucaugcgacaaccgacuauucuagcacguccaaucugagcgagguggaaacagcuauucacgucgaguuuuacaucauucccagaucucaggaauccaaaugcaacgaguauaucaauaccggacuc

SEQ ID NO: 501 - RNA, 477 nt, Artificial Sequence
  derived and/or modified CDS sequence (opt5) from RVA/BE1128/P[8]__AEX30671.1__VP8*(65-223)
cuggacggccccuaccagccuaccacauucacgccgcccaccgauuauuggauccucauuacaagcaacaccaaugggguggucuacgaguccacaaacaauucugacuuuuggaccgccguuaucgcuguggaaccucacgugaaccccgucgauagacaauauaauguguucggagagaacaagcaguuuaauguucggaacgacagcgauaaauggaaguuccuggaaauguuucgcggcuccucucagaaugacuucuacaacagacggacacuuaccagcgauacgcgccugguggggauucucaaauauggaggcagagucuggaccuuucauggggagacaccucgggccaccacagacuccucuaauaccgcgaaccuggauggaaucagcauuacgauccacuccgaguucuacaucauuccccgcagccaggaaucuaagugcaaugaguauaucaacaauggccuu

SEQ ID NO: 502 - RNA, 477 nt, Artificial Sequence
  derived and/or modified CDS sequence (opt5) from RVA/Wa-VirWa/P[8]__ACR22783.1__VP8*(65-223)
cuggacggccccuaccagccuaccacauucacgccgcccaacgauuauuggauccucauuaauagcaacaccaaugggguggucuacgaguccacaaacaauucugacuuuuggaccgccguuguggcuaucgaaccucacgugaaccccgucgauagacaauauacaauuuucggagagagcaagcaguuuaaugugcggaacgacuccaauaaauggaaguuccuggaaauguuucgcucuagcucccagaacgaguucuacaauagacggacccuuacaucugauacccgccugguuggcauccucaaauaugggggaagaguguggacguuucauggcgaaaccccucgggccacaaccgacagcuccagcacagcgaaccugaauaacauuucuaucaccauccacuccgaguucuacauuaucccccgcagccaggagucuaagugcaaugaauauauuaacaacgggcuu

SEQ ID NO: 503 - RNA, 477 nt, Artificial Sequence
  derived and/or modified CDS sequence (opt5) from RVA/Wa/P[8]__AAA47290.1__VP8*(65-223)
cuggacggccccuaccagccuaccacauucacgccgcccaacgauuauuggauccucauuaauagcaacaccaaugggguggucuacgaguccacaaacaauucugacuuuuggaccgccguuguggcuaucgaaccucacgugaaccccgucgauagacaauauacaauuuucggagagagcaagcaguuuaauguguccaacgacucuaauaaauggaaguuccuggaaauguuucggagcuccucucagaacgaguucuacaaucgcagaacccuuacaagcgauacccgguuuguuggcauccugaaauaugggggacgcguguggacguuccauggcgaaaccccuagagccacaaccgacuccagcucuacagcgaaccucaauaacauuuccaucaccauccacagcgaguuuuacauuaucccccggucucaggaguccaagugcaaugaauauauuaacaacgggcug

SEQ ID NO: 504 - RNA, 477 nt, Artificial Sequence; identical to SEQ ID NO: 503
  derived and/or modified CDS sequence (opt5) from RVA/Wa/P[8]__AAA66953.1__VP8*(65-223)

SEQ ID NO: 505 - RNA, 549 nt, Artificial Sequence
  derived and/or modified CDS sequence (opt5) from RVA/BE1058/P[4]__AEX30665.1__VP8*(41-223)
gcccagaccagauacgcucccgugaacuggggccacggggagaucaaugacagcacaacggucgaaccuguucuggauggaccguaucaacccaccacauucaagccucccaacgacuacuggcuccugauuuccucuaauaccgauggcgugguguaugagagcacaaacaauuccgacuuuuggaccgccgucaucgcgguggaaccucauguuaaccagacaaaucggcaguacgugcuuuucggggagaacaaacaguuuaauauugaaaacucuagcgauaaguggaaauucuuugagauguucaagggaaauucccaaucugacuuuagcaaccgcagaacccugacguccagcaaucggcucgucggcaugcugaaauaugggggacgcguguggaccuuccacggcgagacacccagagcuaccacagauucuuccagcaccgccgaccuuaacaauaucucuauuaucauccauuccgaauuuuacauuaucccucggagccaggagucuaagugcaacgaauauauuaacaauggccug

SEQ ID NO: 506 - RNA, 549 nt, Artificial Sequence
  derived and/or modified CDS sequence (opt5) from RVA/DS-1/P[4]__CAD62680.1__VP8*(41-223)
gcccagaccagauacgcucccgugaacuggggcagcugggagaucaaugacuccacaacggucgaaccuguucuggaugggccguaucaacccaccacauucaagccucccaacgacuacuggcuccugauuucuagcaauaccaacggagugguguaugaguccacaaauaacaaugauuuuuggaccgccgucucuagcguggaaccucacguuucccagacaaaccggcaguacauccuuuucggcgagaauaaacaguuuaacguggaaaauaacucugacaaguggaaauucuuugagaccuucacggggagcucccaaggaaauuuuagcaaccgcagaacccugacaucuuccaaucggcucgucggcaugcugaaguaugggggacgcguguggaccuuccauggcgagacacccagagcgaccacggauagcucuaacacagcugaccuuaacaauauuuccaucauuauccacagcgaauuuuacaucauuccucggucucaggaguccaaaugcaacgaauauaucaauaacggccug

SEQ ID NO: 507 - RNA, 549 nt, Artificial Sequence; identical to SEQ ID NO: 506
  derived and/or modified CDS sequence (opt5) from RVA/DS-1/P[4]__ABV53252.1__VP8*(41-223)

SEQ ID NO: 508 - RNA, 549 nt, Artificial Sequence
  derived and/or modified CDS sequence (opt5) from RVA/F01322/P[6]__AFA51886.1__VP8*(41-223)
gcccagaccaacuacgcucccgugacauggagccacggcgaggucaaugacuccacgaccaucgaaccuguucuggaugggccguaucaacccacaaacuucaagccucccaaugacuacuggauucuccugaacccuaccaaucaacagguggugcuugagggaacaaacaaaaccgauaucugggucgcccugcuccugguggaacccaauguuacaaaccagucuagacaguauacccuuuuuggcgagacgaagcagauuaccguggaaaauaacacaaauaaauggaaguucuuugagauguuccggagcuccgucucugcggaguuucagcauaaacgcacccugacaagcgacaccaagcucgcuggguucaugaaguuuuacaacuccguguggacguuccacggagaaacaccuaaugccaccacagauuauucuagcaccuccaaccuguuugagguugaaaccgugauccaugucgaguucuacauuaucccgagaagccaggagucuaaaugcuccgaauauaucaauacaggccug

SEQ ID NO: 509 - RNA, 549 nt, Artificial Sequence
  derived and/or modified CDS sequence (opt5) from RVA/1076/P[6]__AAA47337.1__VP8*(41-223)
gcccagaccaacuacgcucccgugacauggagccacggcgaggucaaugacuccacgaccaucgaaccuguucuggaugggccguaucaacccacaucuuucaagccucccagcgacuacuggauucuccugaacccuaccaaucaacagguggugcuugagggaacaaacaaaaccgauaucugggucgcccugcuccugguggaacccaauguuacaaaccaguccagacaguauacccuuuuuggcgagacgaagcagauuaccguggaaaauaacacaaauaaauggaaguucuuugagauguuccggucuagcgucuccgcggaguuucagcauaaacgcacccugacaucugacaccaagcucgcuggguuccugaaguuuuacaacagcguguggacguucuauggagaaacaccucacgccaccacagauuacuccagcaccucuaaucuguccgagguugaaaccgccauccauguggaguuuuauauuaucccgagaagccaggagucuaaaugcaacgaauacaucaauacaggccuc

SEQ ID NO: 510 - RNA, 549 nt, Artificial Sequence
  derived and/or modified CDS sequence (opt5) from RVA/BE1128/P[8]__AEX30671.1__VP8*(41-223)
gcccagaccagauacgcucccgugaacuggggccacggggagaucaaugacagcacaacggucgaaccuauucuggauggaccguaucaacccaccacauucaccccucccacagacuacuggauccucauuaccuccaacacaaauggcguuguguaugagucuaccaacaauagcgauuuuuggacggccgugaucgcggucgaaccucaugugaaccccguugaccggcaguacaauguguucggggagaacaagcaguuuaauguccgcaacgauuccgacaaauggaaguuccuggaaauguuuagaggaucuagccagaaugauuucuauaaccggcgcacccuuacauccgacaccagacuggugggcauucucaaauacgggggacggguuuggacauuucacggcgagaccccucgcgcuacgacagauucuagcaauaccgccaaccuggacggcaucuccaucacaauucauagcgaguucuauaucauuccgagaucucaagaauccaagugcaaugaguacaucaacaacgggcuu

SEQ ID NO: 511 - RNA, 549 nt, Artificial Sequence
  derived and/or modified CDS sequence (opt5) from RVA/Wa-VirWa/P[8]__ACR22783.1__VP8*(41-223)
gcccagaccagauacgcucccgugaacuggggccacggggagaucaaugacagcacaacggucgaaccuauucuggauggaccguaucaacccaccacauucaccccucccaacgacuacuggauccucauuaauuccaacacaaauggcguuguguaugagucuaccaacaauagcgauuuuuggacagccguggucgcgaucgaaccucaugugaaccccguugaccggcaguacaccauuuucggggaguccaagcaguuuaaugugcgcaacgauucuaauaaauggaaguuccuggaaauguuuagaagcuccucucagaacgaguucuauaaucggcgcacgcuuaccagcgacacaagacuggucggaauccucaaauacggcgggcggguguggaccuuucacggagagacaccucgcgcuaccacggauuccagcucuacagccaaccugaauaacaucuccauuaccauccauagcgaguucuauauuaucccgagaucucaagaauccaagugcaacgaauacauuaauaacggccuu

SEQ ID NO: 512 - RNA, 549 nt, Artificial Sequence
  derived and/or modified CDS sequence (opt5) from RVA/Wa/P[8]__AAA47290.1__VP8*(41-223)
gcccagaccagauacgcucccgugaacuggggccacggggagaucaaugacagcacaacggucgaaccuauucuggauggaccguaucaacccaccacauucaccccucccaacgacuacuggauccucauuaauuccaacacaaauggcguuguguaugagucuaccaacaauagcgauuuuuggacagccguggucgcgaucgaaccucaugugaaccccguugaccggcaguacaccauuuucggggaguccaagcaguuuaaugugucuaacgauagcaauaaauggaaguuccuggaaauguuucgcuccucuagccagaacgaguucuauaauagacggacgcuuaccuccgacacacgcuuugucggaauccugaaauacggcgggagaguguggaccuuccacggagagacaccucgggcuaccacggauucuagcuccacagccaaccucaauaacaucagcauuaccauccauucugaauuuuauauuaucccgcgcucccaagagagcaagugcaacgaauacauuaauaacggccug

SEQ ID NO: 513 - RNA, 549 nt, Artificial Sequence
  derived and/or modified CDS sequence (opt5) from RVA/Wa/P[8]__AAA66953.1__VP8*(41-223)
gcccagaccagauacgcucccgugaacuggggccacggggagaucaaugacagcacaacggucgaaccuaugcuggauggaccguaucaacccaccacauucaccccucccaacgacuacuggauucucaucaauuccaacacaaauggcguuguguaugagucuaccaacaauagcgauuuuuggacagccguggucgcgauugaaccucaugugaaccccguugaccggcaguacaccaucuucggggaguccaagcaguuuaaugugucuaacgauagcaauaaauggaaguuccuggaaauguuucgcuccucuagccagaacgaguucuauaauagacggacgcuuaccuccgacacacgcuuugucggcauucugaaauacggagggagaguguggaccuuccacggagagacaccucgggcuaccacggauucuagcuccacagccaaccucaauaacaucagcaucaccauucauucugaauuuuauaucauuccgcgcucccaagagagcaagugcaacgaauacaucaauaacggccug

SEQ ID NO: 514 - RNA, 543 nt, Artificial Sequence
  derived and/or modified CDS sequence (opt5) from RVA/BE1058/P[4]__AEX30665.1__P2_VP8*(65-223)
augcaguacaucaaggccaacagcaaauucauuggcaucaccgagcugggguccggaucuggccucgacgggcccuaucaaccuacaacguuuaagccgcccaaugauuacuggcugcuuauuagcuccaacaccgacggaguggucuaugaaucuacaaauaacagcgauuucuggaccgcuguuaucgccguggagccucacgugaaucagacaaacagacaguacguccuguuuggcgaaaauaaacaguucaacauugagaauagcucugacaaguggaaauuuuucgaaauguuuaaggggaacagccaauccgauuucagcaaucggcgcacccucacaucuuccaacagacuggugggaaugcuuaaguauggcggccggguuuggaccuuucauggggagacgccccgcgcgaccacagacuccucuuccaccgcugaucugaauaacaucagcaucauuauccacucugaguucuacauuaucccuagaucccaggaaagcaaaugcaaugaguauauuaacaacggacucuga

SEQ ID NO: 515 - RNA, 543 nt, Artificial Sequence
  derived and/or modified CDS sequence (opt5) from RVA/DS-1/P[4]__CAD62680.1__P2_VP8*(65-223)
augcaguacaucaaggccaacagcaaauucauuggcaucaccgagcugggguccggaucuggccucgacgggcccuaucaaccuacaacguuuaagccgcccaaugauuacuggcugcuuauuagcuccaacaccaauggaguggucuaugaaucuacaaacaauaacgacuucuggaccgcuguuagcuccguggagccucacgugucucagacaaauagacaguacauccuguuuggcgaaaacaaacaguucaaugucgagaacaauagcgauaaguggaaauuuuucgaaaccuuuacaggguccagccaaggaaacuucucuaaucggcgcacccucacguccagcaacagacuggugggcaugcuuaaguauggcgggcggguuuggaccuuucauggagagacaccccgcgccaccacagacucuuccaauaccgcggaucugaacaacauuagcaucaucauucacucugaguucuacaucauuccuagaucccaggaaagcaagugcaaugaguauaucaacaauggccucuga

SEQ ID NO: 516 - RNA, 543 nt, Artificial Sequence; identical to SEQ ID NO: 515
  derived and/or modified CDS sequence (opt5) from RVA/DS-1/P[4]__ABV53252.1__P2_VP8*(65-223)

SEQ ID NO: 517 - RNA, 543 nt, Artificial Sequence
  derived and/or modified CDS sequence (opt5) from RVA/F01322/P[6]__AFA51886.1__P2_VP8*(65-223)
augcaguacaucaaggccaacagcaaauucauuggcaucaccgagcugggguccggaucuggccucgacgggcccuaucaaccuacaaauuuuaagccgcccaacgauuacuggauucugcuuaauccuacgaaccaacaggugguccuggaaggaaccaauaaaacagacaucuggguugcucuccugcuuguggagcccaacgugaccaaucagagcagacaguauacacuguucggcgaaaccaagcagauuacagucgagaacaauaccaacaaauggaaguuuuucgaaauguuucgguccucugugagcgccgaguuccagcacaagcgcacgcucaccuccgauacaaaacuggcgggguuuaugaaguucuacaauucuguuuggaccuuucauggagagacaccuaacgcuaccacggacuauagcuccacaagcaaucuguucgaaguggagaccgucauccacguggaauuuuacaucauucccagaucucaggaguccaaaugcagcgaguauaucaacacaggccucuga

SEQ ID NO: 518 - RNA, 543 nt, Artificial Sequence
  derived and/or modified CDS sequence (opt5) from RVA/1076/P[6]__AAA47337.1__P2_VP8*(65-223)
augcaguacaucaaggccaacagcaaauucauuggcaucaccgagcugggguccggaucuggccucgacgggcccuaucaaccuacgagcuuuaagccgcccuccgauuacuggauucugcuuaauccuacaaaccaacaggugguccuggaaggaaccaauaaaacagacaucuggguugcucuccugcuuguggagcccaacgugaccaaucagucuagacaguauacacuguucggcgaaaccaagcagauuacagucgagaacaauaccaacaaauggaaguuuuucgaaauguuucggagcuccgugucugccgaguuccagcacaagcgcacgcucaccagcgauacaaaacuggcgggguuucugaaguucuacaauuccguuuggaccuuuuauggagagacaccucaugcuaccacggacuacagcucuacauccaaccucagcgaaguggagaccgccauccacgucgaguucuauaucauucccagaucucaggaauccaaaugcaaugaguacaucaacacaggccuguga

SEQ ID NO: 519 - RNA, 543 nt, Artificial Sequence
  derived and/or modified CDS sequence (opt5) from RVA/BE1128/P[8]__AEX30671.1__P2_VP8*(65-223)
augcaguacaucaaggccaacagcaaauucauuggcaucaccgagcugggguccggaucuggccucgacgggcccuaucaaccuacaacguuuaccccgcccacagauuacuggauucugaucaccagcaauacaaacggaguggucuaugaauccaccaauaacucugacuucuggacagcuguuauugccguggagccucacgugaaucccgucgauagacaguacaacguguuuggcgaaaauaagcaguucaacguucggaaugacagcgauaaauggaaguuucuugagauguuccgcggguccucucagaacgacuuuuauaauagacggacccugacgagcgauacccgccucgugggaauccugaaauacggcggcagagucuggacauuccauggggaaaccccucgggcgacaaccgacuccagcaacacggcuaaucuugauggaaucucuauuacaauccacuccgaguuuuauauuaucccccgcagccaagagucuaagugcaacgaauacauuaauaacggccuguga

SEQ ID NO: 520 - RNA, 543 nt, Artificial Sequence
  derived and/or modified CDS sequence (opt5) from RVA/Wa-VirWa/P[8]__ACR22783.1__P2_VP8*(65-223)
augcaguacaucaaggccaacagcaaauucauuggcaucaccgagcugggguccggaucuggccucgacgggcccuaucaaccuacaacguuuaccccgcccaaugauuacuggauucugaucaacagcaauacaaacggaguggucuaugaauccaccaauaacucugacuucuggacagcuguuguggccauugagccucacgugaaucccgucgauagacaguacaccaucuuuggcgaaagcaagcaguucaacgugcggaaugacuccaacaaauggaaguuucuugagauguuccgcucuagcucccagaaugaauuuuauaacagacggacacugaccagcgauacgcgccucguugggauccugaaauacggaggcagaguguggaccuuccauggcgagacaccucgggcgaccacagacucuuccagcaccgcuaaucuuaacaauauuucuaucacgauucacuccgaguuuuauaucauuccccgcagccaagaaucuaagugcaacgaguacaucaacaaugggcuguga

SEQ ID NO: 521 - RNA, 543 nt, Artificial Sequence
  derived and/or modified CDS sequence (opt5) from RVA/Wa/P[8]__AAA47290.1__P2_VP8*(65-223)
augcaguacaucaaggccaacagcaaauucauuggcaucaccgagcugggguccggaucuggccucgacgggcccuaucaaccuacaacguuuaccccgcccaaugauuacuggauucugaucaacagcaauacaaacggaguggucuaugaauccaccaauaacucugacuucuggacagcuguuguggccauugagccucacgugaaucccgucgauagacaguacaccaucuuuggcgaaagcaagcaguucaacguguccaaugacucuaacaaauggaaguuucuugagauguuccggagcuccagccagaaugaauuuuauaaccgcagaacacugaccucugauacgcgguucguugggauccucaaauacggaggccgcguguggaccuuucauggcgagacaccuagagcgaccacagacuccagcucuaccgcuaaucugaacaauauuuccaucacgauucacagcgaguucuauaucauuccccggucucaagaauccaagugcaacgaguacaucaacaaugggcuuuga

SEQ ID NO: 522 - RNA, 543 nt, Artificial Sequence; identical to SEQ ID NO: 521
  derived and/or modified CDS sequence (opt5) from RVA/Wa/P[8]__AAA66953.1__P2_VP8*(65-223)

SEQ ID NO: 523 - RNA, 615 nt, Artificial Sequence
  derived and/or modified CDS sequence (opt5) from RVA/BE1058/P[4]__AEX30665.1__P2_VP8*(41-223)
augcaguacaucaaggccaacagcaaauucauuggcaucaccgagcugggguccggaucuggcgcucaaacaagauaugcccccgugaauugggggcacggagaaauuaacgacagcacgaccgucgagccuguucucgauggcccguaccagcccacaaccuuuaagccucccaaugacuauuggcugcuuaucuccucuaacacagauggggugguguacgaaagcaccaauaacuccgacuucuggacagcggucauugcuguggagccucauguuaaucagaccaaccggcaguaugugcuguuuggagaaaauaaacaauucaacaucgaaaauucuagcgauaaguggaaauuuuucgagauguuuaagggcaacucccagagcgacuucucuaaucgcagaacgcucaccuccagcaaccggcuggucggcaugcuuaaguacgggggacgcguguggacauuucacggcgagacccccagagccacaaccgauucuuccagcacggccgaccugaauaacaucucuauuaucauucauuccgaguucuauaucauuccucggagccaggaauccaaaugcaacgaguacaucaauaacgggcucuga

SEQ ID NO: 524 - RNA, 615 nt, Artificial Sequence
  derived and/or modified CDS sequence (opt5) from RVA/DS-1/P[4]__CAD62680.1__P2_VP8*(41-223)
augcaguacaucaaggccaacagcaaauucauuggcaucaccgagcugggguccggaucuggcgcucaaacaagauaugcccccgugaauugggggagcugggaaauuaacgacuccacgaccgucgagccuguucucgauggaccguaccagcccacaaccuuuaagccucccaaugacuauuggcugcuuaucucuagcaacacaaauggcgugguguacgaauccaccaacaauaacgauuucuggacagcggucucuagcguggagccucacguuucccagaccaaucggcaguauauucuguuuggggaaaacaaacaauucaauguggagaacaauagcgacaaguggaaauuuuucgagacguuuaccggaucuucccagggcaacuucagcaaucgcagaacacucaccucuuccaaccggcuggucggcaugcuuaaguacgggggacgcguguggacauuucauggcgaaacccccagagcuacgacagauagcucuaacaccgccgaccugaauaacaucuccaucauuauccacagcgaguucuauauuaucccucggucccaggaaucuaagugcaaugaguacauuaacaaugggcucuga

SEQ ID NO: 525 - RNA, 615 nt, Artificial Sequence; identical to SEQ ID NO: 524
  derived and/or modified CDS sequence (opt5) from RVA/DS-1/P[4]__ABV53252.1__P2_VP8*(41-223)

SEQ ID NO: 526 - RNA, 615 nt, Artificial Sequence
  derived and/or modified CDS sequence (opt5) from RVA/F01322/P[6]__AFA51886.1__P2_VP8*(41-223)
augcaguacaucaaggccaacagcaaauucauuggcaucaccgagcugggguccggaucuggcgcucaaacaaauuaugcccccgugacguggagccacggggaagucaacgacuccaccacaauugagccuguucucgauggaccguaccagcccaccaauuuuaagccucccaacgacuauuggauccugcuuaauccuacaaaccaacagguggugcuggaaggcaccaauaaaacagauauuugggucgcgcuccugcuuguggagcccaacguuaccaaucagucuagacaguacacgcuguucggggaaaccaagcagaucacaguggagaacaauaccaacaaauggaaguuuuucgagauguuucggagcuccgucucugcugaguuccagcauaagcgcacacucaccagcgacacgaaacuggccggauuuaugaaguucuauaauuccguguggacauuucacggcgaaaccccuaacgccacaaccgauuacagcucuaccuccaaucuguucgaaguugagacagugauccaugucgaguuuuauauuaucccgagaagccaagaaucuaaaugcuccgaguacauuaacacgggccucuga

SEQ ID NO: 527 - RNA, 615 nt, Artificial Sequence
  derived and/or modified CDS sequence (opt5) from RVA/1076/P[6]__AAA47337.1__P2_VP8*(41-223)
augcaguacaucaaggccaacagcaaauucauuggcaucaccgagcugggguccggaucuggcgcucaaacaaauuaugcccccgugacguggagccacggggaagucaacgacuccaccacaauugagccuguucucgauggaccguaccagcccaccucuuuuaagccucccagcgacuauuggauccugcuuaauccuacaaaccaacagguggugcuggaaggcaccaauaaaacagauauuugggucgcgcuccugcuuguggagcccaacguuaccaaucaguccagacaguacacgcuguucggggaaaccaagcagaucacaguggagaacaauaccaacaaauggaaguuuuucgagauguuucggucuagcgucuccgcugaguuccagcauaagcgcacacucaccagcgacacgaaacuggccggauuucugaaguucuauaauucuguguggacauuuuacggcgaaaccccucacgccacaaccgauuauuccagcaccucuaaccucuccgaaguugagacagcuauccauguggaguucuacauuaucccgagaagccaagaaucuaaaugcaaugaguacauuaacacgggccuguga

SEQ ID NO: 528 - RNA, 615 nt, Artificial Sequence
  derived and/or modified CDS sequence (opt5) from RVA/BE1128/P[8]__AEX30671.1__P2_VP8*(41-223)
augcaguacaucaaggccaacagcaaauucauuggcaucaccgagcugggguccggaucuggcgcucaaacaagauaugcccccgugaauugggggcacggagaaauuaacgacagcacgaccgucgagccuauccucgauggcccguaccagcccacaaccuuuacaccucccaccgacuauuggauucugaucacauccaauaccaacgggguuguguacgaaucuacgaauaacagcgauuucuggaccgcggugaucgcugucgagccucaugugaaucccguugaccggcaguauaacguguuuggagaaaauaagcaguucaacguccgcaaugauuccgacaaauggaaguuucuugagauguucagaggcucuagccaaaacgauuuuuacaaucggcgcacacugaccuccgacacaagacucgugggcauucugaaauaugggggacggguuuggaccuuccacggcgagacgccucgcgccacaaccgauagcucuaacacagccaaucuugacgggaucuccauuaccauccauagcgaauuuuacauuaucccgagaucucaggaguccaagugcaacgaauacauuaacaauggacuguga

SEQ ID NO: 529 - RNA, 615 nt, Artificial Sequence
  derived and/or modified CDS sequence (opt5) from RVA/Wa-VirWa/P[8]__ACR22783.1__P2_VP8*(41-223)
augcaguacaucaaggccaacagcaaauucauuggcaucaccgagcugggguccggaucuggcgcucaaacaagauaugcccccgugaauugggggcacggagaaauuaacgacagcacgaccgucgagccuauccucgauggcccguaccagcccacaaccuuuacaccucccaaugacuauuggauucugaucaacuccaauaccaacgggguuguguacgaaucuacaaauaacagcgauuucuggaccgcgguggucgcuaucgagccucaugugaaucccguugaccggcaguauacgauuuuuggagaauccaagcaguucaacgugcgcaaugauucuaacaaauggaaguuucuugagauguucagaagcuccagccaaaaugaguuuuacaaccggcgcacccugacaucugacaccagacucgucggcauccugaaauauggcgggcggguguggacauuccacggagaaaccccucgcgccacgacagauuccagcucuaccgccaaucuuaacaacauuuccaucacaauucauagcgaguuuuacaucauuccgagaucucaggaauccaagugcaaugaguacaucaacaauggccuguga

SEQ ID NO: 530 - RNA, 615 nt, Artificial Sequence
  derived and/or modified CDS sequence (opt5) from RVA/Wa/P[8]__AAA47290.1__P2_VP8*(41-223)
augcaguacaucaaggccaacagcaaauucauuggcaucaccgagcugggguccggaucuggcgcucaaacaagauaugcccccgugaauugggggcacggagaaauuaacgacagcacgaccgucgagccuauccucgauggcccguaccagcccacaaccuuuacaccucccaaugacuauuggauucugaucaacuccaauaccaacgggguuguguacgaaucuacaaauaacagcgauuucuggaccgcgguggucgcuaucgagccucaugugaaucccguugaccggcaguauacgauuuuuggagaauccaagcaguucaacgugucuaaugauagcaacaaauggaaguuucuugagauguuccgcuccagcucucaaaaugaguuuuacaacagacggacccugacauccgacacccgcuucgucggcauccucaaauauggcgggagaguguggacauuucacggagaaaccccucgggccacgacagauucuagcuccaccgccaaucugaacaacauuagcaucacaauucauucugaguucuacaucauuccgcgcucccaggaaagcaagugcaaugaguacaucaacaauggccuuuga

SEQ ID NO: 531 - RNA, 615 nt, Artificial Sequence
  derived and/or modified CDS sequence (opt5) from RVA/Wa/P[8]__AAA66953.1__P2_VP8*(41-223)
augcaguacaucaaggccaacagcaaauucauuggcaucaccgagcugggguccggaucuggcgcucaaacaagauaugcccccgugaauugggggcacggagaaauuaacgacagcacgaccgucgagccuaugcucgauggcccguaccagcccacaaccuuuacaccucccaaugacuauuggauccugauuaacuccaauaccaacgggguuguguacgaaucuacaaauaacagcgauuucuggaccgcgguggucgcuaucgagccucaugugaaucccguugaccggcaguauacgaucuuuggagaauccaagcaguucaacgugucuaaugauagcaacaaauggaaguuucuugagauguuccgcuccagcucucaaaaugaguuuuacaacagacggacccugacauccgacacccgcuucgucggcauucucaaauauggcgggagaguguggacauuucacggagaaaccccucgggccacgacagauucuagcuccaccgccaaucugaacaacaucagcauuacaauccauucugaguucuacauuaucccgcgcucccaggaaagcaagugcaaugaguacauuaacaauggccuuuga

SEQ ID NO: 532 - RNA, 1041 nt, Artificial Sequence
  derived and/or modified CDS sequence (opt5) from RVA/BE1058/P[4]__AEX30665.1__P2_VP8*(65-223)_Ferritin
augcaguacaucaaggccaacagcaaauucauuggcaucaccgagcugggguccggaucuggccucgacgggcccuaucaaccuacaacguuuaagccgcccaaugauuacuggcugcuuauuagcuccaacaccgacggaguggucuaugaaucuacaaauaacagcgauuucuggaccgcuguuaucgccguggagccucacgugaaucagacaaacagacaguacguccuguuuggcgaaaauaaacaguucaacauugagaauagcucugacaaguggaaauuuuucgaaauguuuaaggggaacagccaauccgauuucagcaaucggcgcacccucacaucuuccaacagacuggugggaaugcuuaaguauggcggccggguuuggaccuuucauggggagacgccccgcgcgaccacagacuccucuuccaccgcugaucugaauaacaucagcaucauuauccacucugaguucuacauuaucccuagaucccaggaaagcaaaugcaaugaguauauuaacaacggacucuccggcggggacaucauuaagcugcugaaugaacaggugaacaaagagaugcagucuagcaaucucuacauguccaugagcucuugguguuacacacauucccuggauggagccggccuuuuucuguucgaccacgccgcugaggaauaugagcaugccaagaaacucaucaucuuucugaacgaaaauaacguccccgugcaacuuaccagcauuucugcuccugagcacaaguucgaagggcugacgcagaucuuccagaaggccuacgagcacgagcagcauauuagcgaauccaucaauaacauuguugaucacgcgaucaaaucuaaggaccaugccacauuuaauuuccuccaaugguauguggcugagcagcacgaagaggaaguccuguuuaaagauauccuggacaagauugagcucaucggaaacgagaaucacggccuguaccuugccgaccaguaugugaaaggcauugcuaagagccggaaauccuga

SEQ ID NO: 533 - RNA, 1041 nt, Artificial Sequence
  derived and/or modified CDS sequence (opt5) from RVA/DS-1/P[4]__CAD62680.1__P2_VP8*(65-223)_Ferritin
augcaguacaucaaggccaacagcaaauucauuggcaucaccgagcugggguccggaucuggccucgacgggcccuaucaaccuacaacguuuaagccgcccaaugauuacuggcugcuuauuagcuccaacaccaauggaguggucuaugaaucuacaaacaauaacgacuucuggaccgcuguuagcuccguggagccucacgugucucagacaaauagacaguacauccuguuuggcgaaaacaaacaguucaaugucgagaacaauagcgauaaguggaaauuuuucgaaaccuuuacaggguccagccaaggaaacuucucuaaucggcgcacccucacguccagcaacagacuggugggcaugcuuaaguauggcgggcggguuuggaccuuucauggagagacaccccgcgccaccacagacucuuccaauaccgcggaucugaacaacauuagcaucaucauucacucugaguucuacaucauuccuagaucccaggaaagcaagugcaaugaguauaucaacaauggccucuccgggggagacauuaucaaacugcugaacgaacaggugaauaaggagaugcagucuagcaaccucuacauguccaugagcucuugguguuacacgcauucccuggauggcgcugggcuuuuucuguucgaccacgccgccgaggaauaugagcaugcuaaaaagcucauuaucuuucugaaugaaaacaauguccccgugcaacuuacaagcaucucugccccugagcacaaauucgaaggacugacccagauuuuccagaaggcuuacgagcacgagcagcauaucagcgaauccauuaacaauaucguugaucacgccauuaagucuaaagaccaugcgacauuuaacuuccuccaaugguauguggccgagcagcacgaagaggaaguccuguuuaaggauauccuggacaaaaucgagcucauuggcaaugagaaccacggccuguaccuugcugaucaguaugugaaggggaucgccaaaagccggaaguccuga

SEQ ID NO: 534 - RNA, 1041 nt, Artificial Sequence; identical to SEQ ID NO: 533
  derived and/or modified CDS sequence (opt5) from RVA/DS-1/P[4]__ABV53252.1__P2_VP8*(65-223)_Ferritin

SEQ ID NO: 535 - RNA, 1041 nt, Artificial Sequence
  derived and/or modified CDS sequence (opt5) from RVA/F01322/P[6]__AFA51886.1__P2_VP8*(65-223)_Ferritin
augcaguacaucaaggccaacagcaaauucauuggcaucaccgagcugggguccggaucuggccucgacgggcccuaucaaccuacaaauuuuaagccgcccaacgauuacuggauucugcuuaauccuacgaaccaacaggugguccuggaaggaaccaauaaaacagacaucuggguugcucuccugcuuguggagcccaacgugaccaaucagagccggcaguauacacuguucggcgaaaccaagcagauuacagucgagaacaauaccaacaaauggaaguuuuucgaaauguuucgguccucugugagcgccgaguuccagcacaagcgcacgcucaccuccgauacaaaacuggcgggguuuaugaaguucuacaauucuguuuggaccuuucauggagagacaccuaacgcuaccacggacuauagcuccacaagcaaucuguucgaaguggagaccgucauccacguggaauuuuacaucauucccagaucucaggaguccaaaugcagcgaguauaucaacacaggccucucuggcggggauauuaucaagcugcuuaaugaacaaguuaacaaagagaugcaguccagcaaccuguacaugucuauguccagcugguguuacacccauucccucgacggagccggccuguuccuuuuugaucacgccgcugaagaguaugaacaugccaagaagcugauuaucuuccucaaugagaacaaugugccuguccagcugaccucuauuagcgcuccggagcacaaauucgaagggcugacacagaucuuucaaaaggccuacgagcacgaacagcauaucuccgagagcauuaacaauaucguggaccacgcgauuaaaucuaaggaucaugccacguucaacuuucuccagugguauguggcugaacaacacgaggaggaaguccuguucaaagacauccuugauaagauugagcugaucggaaaugaaaaccacggccucuaccuggccgaccaguauguuaaagggaucgcuaaguccagaaagagcuga

SEQ ID NO: 536 - RNA, 1041 nt, Artificial Sequence
  derived and/or modified CDS sequence (opt5) from RVA/1076/P[6]__AAA47337.1__P2_VP8*(65-223)_Ferritin
augcaguacaucaaggccaacagcaaauucauuggcaucaccgagcugggguccggaucuggccucgacgggcccuaucaaccuacgagcuuuaagccgcccuccgauuacuggauucugcuuaauccuacaaaccaacaggugguccuggaaggaaccaauaaaacagacaucuggguugcucuccugcuuguggagcccaacgugaccaaucagucucggcaguauacacuguucggcgaaaccaagcagauuacagucgagaacaauaccaacaaauggaaguuuuucgaaauguuucggagcuccgugucugccgaguuccagcacaagcgcacgcucaccagcgauacaaaacuggcgggguuucugaaguucuacaauuccguuuggaccuuuuauggagagacaccucaugcuaccacggacuacagcucuacauccaaccucagcgaaguggagaccgccauccacgucgaguucuauaucauucccagaucucaggaauccaaaugcaaugaguacaucaacacaggccugagcggcggggauauuaucaaacuucugaaugaacaagugaacaaggagaugcagucuuccaaucucuacaugagcauguccucuugguguuauacccauagccuggacggagccggccuuuuucuguucgaucacgcugccgaagaguacgaacaugcuaagaagcucauuaucuuucugaacgagaacaauguuccugugcagcugaccuccauuagcgccccggagcacaaauucgaagggcucacacagaucuuccaaaaggcguaugagcacgaacagcauaucucugaguccauuaacaauaucgucgaccacgccauuaaaagcaaggaucaugcuacguuuaacuuccugcagugguacguggccgaacaacacgaggaggaagugcuuuuuaaagacauccuggauaagauugagcucaucggaaaugaaaaccacggccuguaucuugcugaccaguacgucaaagggaucgccaagucuagaaagagcuga

SEQ ID NO: 537 - RNA, 1041 nt, Artificial Sequence
  derived and/or modified CDS sequence (opt5) from RVA/BE1128/P[8]__AEX30671.1__P2_VP8*(65-223)_Ferritin
augcaguacaucaaggccaacagcaaauucauuggcaucaccgagcugggguccggaucuggccucgacgggcccuaucaaccuacaacguuuaccccgcccacagauuacuggauucugaucaccagcaauacaaacggaguggucuaugaauccaccaauaacucugacuucuggacagcuguuauugccguggagccucacgugaaucccgucgauagacaguacaacguguuuggcgaaaauaagcaguucaacguucggaaugacagcgauaaauggaaguuucuugagauguuccgcggguccucucagaacgacuuuuauaauagacggacccugacgagcgauacccgccucgugggaauccugaaauacggcggcagagucuggacauuccauggggaaaccccucgggcgacaaccgacuccagcaacacggcuaaucuugauggaaucucuauuacaauccacuccgaguuuuauauuaucccccgcagccaagagucuaagugcaacgaauacauuaauaacggccuguccgggggagacaucauuaagcuccugaacgaacaggugaauaaagagaugcagagcucuaaccuguacauguccaugagcuccugguguuauacccauucucucgauggcgccgggcuguuccuuuuugaccacgccgcugaggaguacgaacaugccaagaaacugaucaucuuccucaaugagaacaauguuccugugcagcugacaagcauuuccgcuccggaacacaaguuugagggacuuacccaaaucuuccagaaagccuaugaacacgagcagcauauuagcgagucuaucaacaauauugucgaucacgcgaucaaguccaaggaccaugccaccuucaacuuucugcagugguacguggcugaacaacacgaggaagagguccucuucaaagacauccuggauaagauugaacugaucggcaaugagaaccacggccucuaucuggccgaccaguacgugaaagggauugcuaagagcagaaaaucuuga

SEQ ID NO: 538 - RNA, 1041 nt, Artificial Sequence
  derived and/or modified CDS sequence (opt5) from RVA/Wa-VirWa/P[8]__ACR22783.1__P2_VP8*(65-223)_Ferritin
augcaguacaucaaggccaacagcaaauucauuggcaucaccgagcugggguccggaucuggccucgacgggcccuaucaaccuacaacguuuaccccgcccaaugauuacuggauucugaucaacagcaauacaaacggagugguguaugaauccaccaauaacucugacuucuggacagcuguuguggccauugagccucacgugaaucccgucgauagacaguacaccaucuuuggcgaaagcaagcaguucaacgugcggaaugacuccaacaaauggaaguuucuugagauguuccgcucuagcucccagaaugaauuuuauaacagacggacacugaccagcgauacgcgccucguugggauccugaaauacggaggcagaguguggaccuuccauggcgagacaccucgggcgaccacagacucuuccagcaccgcuaaucuuaacaauauuucuaucacgauucacuccgaguuuuauaucauuccccgcagccaagaaucuaagugcaacgaguacaucaacaaugggcuguccggaggcgauauuaucaagcuccugaacgaacaggucaauaaagagaugcagagcuccaaccuguacaugucuaugagcuccugguguuauacacauagccucgacggggccggacuguuccuuuuugaucacgccgcugaggaauacgagcaugccaagaaacugaucauuuuccucaaugaaaacaaugugccuguucagcugaccucuaucuccgcuccggagcacaaguuugaaggccuuacacaaauuuuccagaaagccuaugagcacgagcagcauaucagcgaaucuauuaacaauaucguggaccacgcgaucaagagcaaggaucaugccaccuucaacuuucugcagugguacgucgcugagcaacacgaagaggaaguccucuucaaagacauucuggauaagaucgagcugauugggaaugagaaccacggacucuaucuggccgaccaguacgugaaaggcaucgcuaaguccagaaaaucuuga

SEQ ID NO: 539 - RNA, 1041 nt, Artificial Sequence
  derived and/or modified CDS sequence (opt5) from RVA/Wa/P[8]__AAA47290.1__P2_VP8*(65-223)_Ferritin
augcaguacaucaaggccaacagcaaauucauuggcaucaccgagcugggguccggaucuggccucgacgggcccuaucaaccuacaacguuuaccccgcccaaugauuacuggauucugaucaacagcaauacaaacggaguggucuaugaauccaccaauaacucugacuucuggacagcuguuguggccauugagccucacgugaaucccgucgauagacaguacaccaucuuuggcgaaagcaagcaguucaacguguccaaugacucuaacaaauggaaguuucuugagauguuccggagcuccagccagaaugaauuuuauaaccgcagaacacugaccucugauacgcgguucguugggauccucaaauacggaggccgcguguggaccuuucauggcgagacaccuagagcgaccacagacuccagcucuaccgcuaaucugaacaauauuuccaucacgauucacagcgaguucuauaucauuccccggucucaagaauccaagugcaacgaguacaucaacaaugggcuuagcggaggcgauauuaucaagcugcucaacgaacaggucaauaaagagaugcaguccucuaaccuguacaugagcauguccagcugguguuauacacauucucuggacggggccggacucuuucuguucgaucacgccgcugaggaauacgagcaugccaagaaacuuaucauuuuucugaaugaaaacaaugugccuguucagcucaccuccaucagcgcuccggagcacaaguucgaaggccugacacaaauuuuccagaaagccuaugagcacgagcagcauaucucugaaagcauuaacaauaucguggaccacgcgaucaaguccaaggaucaugccaccuuuaacuuccuucagugguacgucgcugagcaacacgaagaggaagugcuguuuaaagacauucucgauaagaucgagcugauugggaaugagaaccacggacuguaucucgccgaccaguacgugaaaggcaucgcuaagucucgcaaaagcuga

SEQ ID NO: 540 - RNA, 1041 nt, Artificial Sequence; identical to SEQ ID NO: 539
  derived and/or modified CDS sequence (opt5) from RVA/Wa/P[8]__AAA66953.1__P2_VP8*(65-223)_Ferritin

SEQ ID NO: 541 - RNA, 1113 nt, Artificial Sequence
  derived and/or modified CDS sequence (opt5) from RVA/BE1058/P[4]__AEX30665.1__P2_VP8*(41-223)_Ferritin
augcaguacaucaaggccaacagcaaauucauuggcaucaccgagcugggguccggaucuggcgcucaaacaagauaugcccccgugaauugggggcacggagaaauuaacgacagcacgaccgucgagccuguucucgauggcccguaccagcccacaaccuuuaagccucccaaugacuauuggcugcuuaucuccucuaacacagauggggugguguacgaaagcaccaauaacuccgacuucuggacagcggucauugcuguggagccucauguuaaucagaccaaccggcaguaugugcuguuuggagaaaauaaacaauucaacaucgaaaauucuagcgauaaguggaaauuuuucgagauguuuaagggcaacucccagagcgacuucucuaaucgcagaacgcucaccuccagcaaccggcuggucggcaugcuuaaguacgggggacgcguguggacauuucacggcgagacccccagagccacaaccgauucuuccagcacggccgaccugaauaacaucucuauuaucauucauuccgaguucuauaucauuccucggagccaggaauccaaaugcaacgaguacaucaauaacgggcucucuggaggcgauauuaucaagcugcugaaugagcagguuaacaaagaaaugcaaagcuccaaucucuacaugagcaugucuuccugguguuauacacacagccuggacggggcuggacuuuuucuguucgaucaugccgcugaggaauacgagcacgccaagaaacucaucauuuuucugaacgaaaauaacgugccgguccagcuuaccucuaucagcgcgcccgagcacaaguucgagggccugacacagauuuuccagaaggccuaugaacaugagcaacacaucuccgaaucuauuaauaacaucguggaccaugcuaucaaaagcaaggaucacgccaccuuuaauuuccuccagugguacguggcugagcagcacgaagaggagguccuguuuaaagacauucuggacaagaucgaacucauuggcaacgagaaucaugggcuguaucuugccgaucaauacguuaaaggaaucgcgaagucccgcaaaagcuga

SEQ ID NO: 542 - RNA, 1113 nt, Artificial Sequence
  derived and/or modified CDS sequence (opt5) from RVA/DS-1/P[4]__CAD62680.1__P2_VP8*(41-223)_Ferritin
augcaguacaucaaggccaacagcaaauucauuggcaucaccgagcugggguccggaucuggcgcucaaacaagauaugcccccgugaauugggggagcugggaaauuaacgacuccacgaccgucgagccuguucucgauggaccguaccagcccacaaccuuuaagccucccaaugacuauuggcugcuuaucucuagcaacacaaauggcgugguguacgaauccaccaacaauaacgauuucuggacagcggucucuagcguggagccucacguuucccagaccaaucggcaguauauucuguuuggggaaaacaaacaauucaauguggagaacaauagcgacaaguggaaauuuuucgagacguuuaccggaucuucccagggcaacuucagcaaucgcagaacacucaccucuuccaaccggcuggucggcaugcuuaaguacgggggacgcguguggacauuucauggcgaaacccccagagcuacgacagauagcucuaacaccgccgaccugaauaacaucuccaucauuauccacagcgaguucuauauuaucccucggucccaggaaucuaagugcaaugaguacauuaacaaugggcucagcggaggcgauaucauuaaacugcugaacgagcagguuaauaaggaaaugcaauccagcaaccucuacaugucuauguccagcugguguuauacacauucucuggacggggccggacuuuuucuguucgaucacgcugccgaggaauacgagcaugcuaaaaagcucaucaucuuucugaaugaaaacaaugugccgguccagcuuaccagcauuuccgcccccgagcacaaauucgagggccugacccagaucuuccagaaggcguaugaacacgagcaacauauuucugaaagcaucaacaauauuguggaccacgccaucaaguccaaagaucaugcuacauuuaacuuccuccagugguacguggccgagcagcacgaagaggagguccuguuuaaggacauccuggauaaaauugaacucaucggcaaugagaaccacgggcuguaucuugcugaccaauacguuaagggaauugccaaaagccgcaagucuuga

SEQ ID NO: 543 - RNA, 1113 nt, Artificial Sequence; identical to SEQ ID NO: 542
  derived and/or modified CDS sequence (opt5) from RVA/DS-1/P[4]__ABV53252.1__P2_VP8*(41-223)_Ferritin

SEQ ID NO: 544 - RNA, 1113 nt, Artificial Sequence
  derived and/or modified CDS sequence (opt5) from RVA/F01322/P[6]__AFA51886.1__P2_VP8*(41-223)_Ferritin
augcaguacaucaaggccaacagcaaauucauuggcaucaccgagcugggguccggaucuggcgcucaaacaaauuaugcccccgugacguggagccacggggaagucaacgacuccaccacaauugagccuguucucgauggaccguaccagcccaccaauuuuaagccucccaacgacuauuggauccugcuuaauccuacaaaccaacagguggugcuggaaggcaccaauaaaacagauauuugggucgcgcuccugcuuguggagcccaacguuaccaaucagucucggcaguacacgcuguucggggaaaccaagcagaucacaguggagaacaauaccaacaaauggaaguuuuucgagauguuucggagcuccgucucugcugaguuccagcauaagcgcacacucaccagcgacacgaaacuggccggauuuaugaaguucuauaauuccguguggacauuucacggcgaaaccccuaacgccacaaccgauuacagcucuaccuccaaucuguucgaaguugagacagugauccaugucgaguuuuauauuaucccgagaagccaagaaucuaaaugcuccgaguacauuaacacgggccucagcgggggagacaucauuaagcugcuuaacgaacaggugaauaaagagaugcagucuuccaaccuguacaugagcauguccucuugguguuauacccacagccucgauggcgcugggcuguuccuuuuugaccaugccgcugaagaguacgagcacgccaagaagcugaucauuuuccucaaugaaaacaaugugcccguccagcugacauccaucagcgcgccugagcacaaauucgaaggacugacccaaaucuuucagaaggccuaugagcaugaacagcacauuucugaguccaucaacaauauuguugaucaugcuaucaaaagcaaggaccacgccacauucaacuuucuccaaugguacguggcugagcagcacgaagaggaagugcuguucaaagauauucuugacaagaucgagcugaucggcaaugaaaaccaugggcucuaucuggccgaucaguacgucaaaggaauugcgaagucuagaaagagcuga

SEQ ID NO: 545 - RNA, 1113 nt, Artificial Sequence
  derived and/or modified CDS sequence (opt5) from RVA/1076/P[6]__AAA47337.1__P2_VP8*(41-223)_Ferritin
augcaguacaucaaggccaacagcaaauucauuggcaucaccgagcugggguccggaucuggcgcucaaacaaauuaugcccccgugacguggagccacggggaagucaacgacuccaccacaauugagccuguucucgauggaccguaccagcccaccucuuuuaagccucccagcgacuauuggauccugcuuaauccuacaaaccaacagguggugcuggaaggcaccaauaaaacagauauuugggucgcgcuccugcuuguggagcccaacguuaccaaucaguccagacaguacacgcuguucggggaaaccaagcagaucacaguggagaacaauaccaacaaauggaaguuuuucgagauguuucggucuagcgucuccgcugaguuccagcauaagcgcacacucaccagcgacacgaaacuggccggauuucugaaguucuauaauucuguguggacauuuuacggcgaaaccccucacgccacaaccgauuauuccagcaccucuaaccucuccgaaguugagacagcuauccauguggaguucuacauuaucccgagaagccaagaaucuaaaugcaaugaguacauuaacacgggccuguccgggggagacaucauuaaacuucugaaugaacaggucaacaaggagaugcagagcuccaaccucuauaugucuaugagcuccugguguuacacccacagccuggauggcgccgggcuuuuucuguucgaccaugcugccgaagaguaugagcacgcgaagaagcucaucauuuuucugaaugaaaacaaugugcccgugcagcugacaucuaucuccgccccugagcacaaauucgaaggacucacccaaaucuuccagaaggcuuacgagcaugaacagcacauuagcgagucuaucaacaauauugucgaucaugccaucaaaagcaaggaccacgcuacauuuaacuuccugcaaugguauguugccgagcagcacgaagaggaagugcuuuuuaaagauauucuggacaagaucgagcucaucggcaaugaaaaccaugggcuguaccuugcggaucaguaugugaaaggaauugccaagucccggaagucuuga

SEQ ID NO: 546 - RNA, 1113 nt, Artificial Sequence
  derived and/or modified CDS sequence (opt5) from RVA/BE1128/P[8]__AEX30671.1__P2_VP8*(41-223)_Ferritin
augcaguacaucaaggccaacagcaaauucauuggcaucaccgagcugggguccggaucuggcgcucaaacaagauaugcccccgugaauugggggcacggagaaauuaacgacagcacgaccgucgagccuauccucgauggcccguaccagcccacaaccuuuacaccucccaccgacuauuggauucugaucacauccaauaccaacgggguuguguacgaaucuacgaauaacagcgauuucuggaccgcggugaucgcugucgagccucaugugaaucccguugaccggcaguauaacguguuuggagaaaauaagcaguucaacguccgcaaugauuccgacaaauggaaguuucuugagauguucagaggcucuagccaaaacgauuuuuacaaucggcgcacacugaccuccgacacaagacucgugggcauucugaaauaugggggacggguuuggaccuuccacggcgagacgccucgcgccacaaccgauagcucuaacacagccaaucuugacgggaucuccauuaccauccauagcgaauuuuacauuaucccgagaucucaggaguccaagugcaacgaauacauuaacaauggacugagcggcggggauaucaucaagcuccugaacgaacaggugaauaaagagaugcagucuuccaaccuguauaugagcauguccucuugguguuacacccacagccucgacggagcuggccuguuccuuuuugaucaugccgcugaggaguaugaacacgccaagaaacugauuaucuuccucaaugagaacaauguccccgugcaacugacauccauuagcgcgccugaacacaaguuugagggccuuacgcagaucuuccagaaagccuacgagcaugaacagcacauuucugaguccaucaacaauaucguggaccaugcuauuaagagcaaggaccacgccaccuucaacuuucugcaaugguaugucgcugaacagcacgaggaagagguucucuucaaagauauccuggacaagauugagcugaucgggaaugaaaaccauggacucuaccuggccgaucaguaugugaaaggcauugcgaagucucggaaaagcuga

SEQ ID NO: 547 - RNA, 1113 nt, Artificial Sequence
  derived and/or modified CDS sequence (opt5) from RVA/Wa-VirWa/P[8]__ACR22783.1__P2_VP8*(41-223)_Ferritin
augcaguacaucaaggccaacagcaaauucauuggcaucaccgagcugggguccggaucuggcgcucaaacaagauaugcccccgugaauugggggcacggagaaauuaacgacagcacgaccgucgagccuauccucgauggcccguaccagcccacaaccuuuacaccucccaaugacuauuggauucugaucaacuccaauaccaacgggguuguguacgaaucuacaaauaacagcgauuucuggaccgcgguggucgcuaucgagccucaugugaaucccguugaccggcaguauacgauuuuuggagaauccaagcaguucaacgugcgcaaugauucuaacaaauggaaguuucuugagauguucagaagcuccagccaaaaugaguuuuacaaccggcgcacccugacaucugacaccagacucgucggcauccugaaauauggcgggcggguguggacauuccacggagaaaccccucgcgccacgacagauuccagcucuaccgccaaucuuaacaacauuuccaucacaauucauagcgaguuuuacaucauuccgagaucucaggaauccaagugcaaugaguacaucaacaauggccugagcgggggagacaucauuaagcuccugaacgagcagguuaauaaagaaaugcaguccucuaaccuguauaugagcauguccagcugguguuacacccacucucucgauggcgcugggcuguuccuuuuugaccaugccgcugaggaauaugagcacgccaagaaacugaucauuuuccucaaugaaaacaaugugcccguccaacugaccuccaucagcgcgccugagcacaaguuugagggacuuacacagauuuuccagaaagccuacgaacaugagcagcacaucucugaaagcaucaacaauauuguggaucaugcuaucaaguccaaggaccacgccacguucaacuuucugcaaugguauguggcugagcagcacgaagaggagguccucuucaaagauauucuggacaagaucgaacugauuggcaaugagaaccauggccucuaccuggccgaccaguauguuaaagggaucgcgaagucucggaaaagcuga

SEQ ID NO: 548 - RNA, 1113 nt, Artificial Sequence
  derived and/or modified CDS sequence (opt5) from RVA/Wa/P[8]__AAA47290.1__P2_VP8*(41-223)_Ferritin
augcaguacaucaaggccaacagcaaauucauuggcaucaccgagcugggguccggaucuggcgcucaaacaagauaugcccccgugaauugggggcacggagaaauuaacgacagcacgaccgucgagccuauccucgauggcccguaccagcccacaaccuuuacaccucccaaugacuauuggauucugaucaacuccaauaccaacgggguuguguacgaaucuacaaauaacagcgauuucuggaccgcgguggucgcuaucgagccucaugugaaucccguugaccggcaguauacgauuuuuggagaauccaagcaguucaacgugucuaaugauagcaacaaauggaaguuucuugagauguuccgcuccagcucucaaaaugaguuuuacaacagacggacccugacauccgacacccgcuucgucggcauccucaaauauggcgggagaguguggacauuucacggagaaaccccucgggccacgacagauagcagcuccaccgccaaucugaacaacauuagcaucacaauucauucugaguucuacaucauuccgcgcucccaggaaagcaagugcaaugaguacaucaacaauggccuuuccgggggagacaucauuaagcugcucaacgagcagguuaauaaagaaaugcagucuagcaaccuguauauguccaugagcucuugguguuacacccacucccuggauggcgcugggcucuuucuguucgaccaugccgcugaggaauaugagcacgccaagaaacuuaucauuuuucugaaugaaaacaaugugcccguccaacucaccagcaucucugcgccugagcacaaguucgagggacugacacagauuuuccagaaagccuacgaacaugagcagcacaucagcgaauccaucaacaauauuguggaucaugcuaucaagucuaaggaccacgccacguuuaacuuccuucaaugguauguggcugagcagcacgaagaggagguccuguuuaaagauauucucgacaagaucgaacugauuggcaaugagaaccauggccuguaccucgccgaccaguauguuaaagggaucgcgaagucuagaaaauccuga

SEQ ID NO: 549 - RNA, 1113 nt, Artificial Sequence
  derived and/or modified CDS sequence (opt5) from RVA/Wa/P[8]__AAA66953.1__P2_VP8*(41-223)_Ferritin
augcaguacaucaaggccaacagcaaauucauuggcaucaccgagcugggguccggaucuggcgcucaaacaagauaugcccccgugaauugggggcacggagaaauuaacgacagcacgaccgucgagccuaugcucgauggcccguaccagcccacaaccuuuacaccucccaaugacuauuggauccugauuaacuccaauaccaacgggguuguguacgaaucuacaaauaacagcgauuucuggaccgcgguggucgcuaucgagccucaugugaaucccguugaccggcaguauacgaucuuuggagaauccaagcaguucaacgugucuaaugauagcaacaaauggaaguuucuugagauguuccgcuccagcucucaaaaugaguuuuacaacagacggacccugacauccgacacccgcuucgucggcauucucaaauauggcgggagaguguggacauuucacggagaaaccccucgggccacgacagauagcagcuccaccgccaaucugaacaacaucagcauuacaauccauucugaguucuacauuaucccgcgcucccaggaaagcaagugcaaugaguacauuaacaauggccuuuccgggggagacaucaucaagcugcucaacgagcagguuaauaaagaaaugcagucuagcaaccuguauauguccaugagcucuugguguuacacccacucccuggauggcgcugggcucuuucuguucgaccaugccgcugaggaauaugagcacgccaagaaacuuauuaucuuucugaaugaaaacaaugugcccguccaacucaccagcauuucugcgccugagcacaaguucgagggacugacacagaucuuccagaaagccuacgaacaugagcagcacauuagcgaauccaucaacaauaucguggaucaugcuauuaagucuaaggaccacgccacguuuaacuuccuucaaugguauguggcugagcagcacgaagaggagguccuguuuaaagauauccucgacaagauugaacugaucggcaaugagaaccauggccuguaccucgccgaccaguauguuaaagggauugcgaagucuagaaaauccuga

SEQ ID NO: 550 - RNA, 1047 nt, Artificial Sequence
  derived and/or modified CDS sequence (opt5) from RVA/BE1058/P[4]__AEX30665.1__LumSynt_P2_VP8*(65-223)
augcagaucuacgagggcaagcugaccgccgaagggcucagauucggaauuguggcuagccgguuuaaccacgcccuggucgaccgccuuguugagggcgcgaucgaugcuauugugagacaugggggacgggaagaggacaucacacuggugcgcguccccggcuccugggaaauuccuguggccgccggggagcucgcuagaaaagaggauaucgacgccguuaucgcuauuggagugcugauccggggcgccacgccgcacuucgauuauauugcgucugaagucagcaagggccuugccgaccugucccucgagcugcgcaaacccaucaccuuuggggugauuacagcugauacccuggaacaagccaucgagagagcuggaacaaagcauggcaauaaagggugggaggccgcgcucucugccauugaaauggcuaaccuguucaagagccuucggggaggcuccgggggaucuggcggcagcgggggauccggcgggggacaguacaucaaggccaauagcaaauuuaucggcauuaccgagcuggggucuggauccggccucgacggcccuuaucagcccacaaccuucaagccucccaacgauuacuggcugcuuaucagcucuaauacggacgggguuguguaugaauccaccaacaauagcgauuuuuggacagcugucauugccguggagccucacgugaaccagaccaaucgccaauacguccuguucggagaaaacaaacaguuuaauaucgagaacucuuccgacaaguggaaauucuuugagauguucaagggcaauagccaguccgauuuuucuaacagacggacacucaccagcuccaaucgccugguugggaugcugaaguauggaggcagaguguggacguuccauggggaaacaccgcgggccaccacagacucuagcuccaccgcugaccucaacaacauuagcaucaucauucacucugaguucuacaucauuccccgcagccaggaauccaaaugcaaugaguacaucaacaauggccuguga

SEQ ID NO: 551 - RNA, 1047 nt, Artificial Sequence
  derived and/or modified CDS sequence (opt5) from RVA/DS-1/P[4]__CAD62680.1__LumSynt_P2_VP8*(65-223)
augcagaucuacgagggcaagcugaccgccgaagggcucagauucggaauuguggcuagccgguuuaaccacgcccuggucgaccgccuuguugagggcgcgaucgaugcuauugugagacaugggggacgggaagaggacaucacacuggugcgcguccccggcuccugggaaauuccuguggccgccggggagcucgcuagaaaagaggauaucgacgccguuaucgcuauuggagugcugauccggggcgccacgccgcacuucgauuauauugcgucugaagucagcaagggccuugccgaccugucccucgagcugcgcaaacccaucaccuuuggggugauuacagcugauacccuggaacaagccaucgagagagcuggaacaaagcauggcaauaaagggugggaggccgcgcucucugccauugaaauggcuaaccuguucaagagccuucggggaggcuccgggggaucuggcggcagcgggggauccggcgggggacaguacaucaaggccaauagcaaauuuaucggcauuaccgagcuggggucuggauccggccucgacggcccuuaucagcccacaaccuucaagccucccaacgauuacuggcugcuuaucagcucuaauacgaacgggguuguguaugaauccaccaauaacaaugacuuuuggacagcugucagcucuguggagccucacgugucccagaccaaccgccaauacauucuguucggagaaaauaaacaguuuaacgucgagaauaacagcgauaaguggaaauucuuugagacauucaccggcuccucucaggggaauuuuagcaacagacggacgcucacauccagcaaccgccugguuggaaugcugaaguauggcgggagaguguggaccuuccauggcgaaacaccgcgggccaccaccgacucuuccaauacagccgaucucaacaauaucagcauuaucauccacucugaguucuacauuaucccccgcagccaggaauccaagugcaacgaguacauuaauaacggacuguga

SEQ ID NO: 552 - RNA, 1047 nt, Artificial Sequence; identical to SEQ ID NO: 551
  derived and/or modified CDS sequence (opt5) from RVA/DS-1/P[4]__ABV53252.1__LumSynt_P2_VP8*(65-223)

SEQ ID NO: 553 - RNA, 1047 nt, Artificial Sequence
  derived and/or modified CDS sequence (opt5) from RVA/F01322/P[6]__AFA51886.1__LumSynt_P2_VP8*(65-223)
augcagaucuacgagggcaagcugaccgccgaagggcucagauucggaauuguggcuagccgguuuaaccacgcccuggucgaccgccuuguugagggcgcgaucgaugcuauugugagacaugggggacgggaagaggacaucacacuggugcgcguccccggcuccugggaaauuccuguggccgccggggagcucgcuagaaaagaggauaucgacgccguuaucgcuauuggagugcugauccggggcgccacgccgcacuucgauuauauugcgucugaagucagcaagggccuugccgaccugucccucgagcugcgcaaacccaucaccuuuggggugauuacagcugauacccuggaacaagccaucgagagagcuggaacaaagcauggcaauaaagggugggaggccgcgcucucugccauugaaauggcuaaccuguucaagagccuucggggaggcuccgggggaucuggcggcagcgggggauccggcgggggacaguacaucaaggccaauagcaaauuuaucggcauuaccgagcuggggucuggauccggccucgacggcccuuaucagcccacaaacuucaagccucccaaugauuacuggauccugcuuaacccuaccaaucagcaaguugugcuggaagggacgaacaaaaccgacauuugggucgcucuccugcugguggagccgaaugugacaaaccagagccgccaguauacccucuuuggagaaacaaagcagaucaccgucgagaauaacacgaauaaauggaaguucuuugagauguucagaucuuccguuagcgccgaauuucaacacaagcggacacugaccucugauacaaaacuugccggcuucaugaaguuuuacaacuccguguggaccuuccauggggagacccccaaugcuacaacggacuauagcuccaccucuaaccuguucgaaguggagacagucauucacguggaauuuuacaucaucccucgcagccaggaguccaaaugcagcgaguacauuaacaccggacucuga

SEQ ID NO: 554 - RNA, 1047 nt, Artificial Sequence
  derived and/or modified CDS sequence (opt5) from RVA/1076/P[6]__AAA47337.1__LumSynt_P2_VP8*(65-223)
augcagaucuacgagggcaagcugaccgccgaagggcucagauucggaauuguggcuagccgguuuaaccacgcccuggucgaccgccuuguugagggcgcgaucgaugcuauugugagacaugggggacgggaagaggacaucacacuggugcgcguccccggcuccugggaaauuccuguggccgccggggagcucgcuagaaaagaggauaucgacgccguuaucgcuauuggagugcugauccggggcgccacgccgcacuucgauuauauugcgucugaagucagcaagggccuugccgaccugucccucgagcugcgcaaacccaucaccuuuggggugauuacagcugauacccuggaacaagccaucgagagagcuggaacaaagcauggcaauaaagggugggaggccgcgcucucugccauugaaauggcuaaccuguucaagagccuucggggaggcuccgggggaucuggcggcagcgggggauccggcgggggacaguacaucaaggccaauagcaaauuuaucggcauuaccgagcuggggucuggauccggccucgacggcccuuaucagcccaccagcuucaagccucccucugauuacuggauccugcuuaacccuaccaaucagcaaguugugcuggaagggacgaacaaaaccgacauuugggucgcucuccugcugguggagccgaaugugacaaaccagucccgccaguauacccucuuuggagaaacaaagcagaucaccgucgagaauaacacgaauaaauggaaguucuuugagauguucagaagcucuguuuccgccgaauuucaacacaagcggacacugaccagcgauacaaaacuugccggcuuccugaaguuuuacaacuccguguggaccuucuauggggagacaccccaugcuacaacggacuacucuagcaccuccaaucucagcgaaguggagacagcgauucacgucgaguucuacaucaucccucgcucucaggaauccaaaugcaacgaguauauuaauaccggacuguga

SEQ ID NO: 555 - RNA, 1047 nt, Artificial Sequence
  derived and/or modified CDS sequence (opt5) from RVA/BE1128/P[8]__AEX30671.1__LumSynt_P2_VP8*(65-223)
augcagaucuacgagggcaagcugaccgccgaagggcucagauucggaauuguggcuagccgguuuaaccacgcccuggucgaccgccuuguugagggcgcgaucgaugcuauugugagacaugggggacgggaagaggacaucacacuggugcgcguccccggcuccugggaaauuccuguggccgccggggagcucgcuagaaaagaggauaucgacgccguuaucgcuauuggagugcugauccggggcgccacgccgcacuucgauuauauugcgucugaagucagcaagggccuugccgaccugucccucgagcugcgcaaacccaucaccuuuggggugauuacagcugauacccuggaacaagccaucgagagagcuggaacaaagcauggcaauaaagggugggaggccgcgcucucugccauugaaauggcuaaccuguucaagagccuucggggaggcuccgggggaucuggcggcagcgggggauccggcgggggacaguacaucaaggccaauagcaaauuuaucggcauuaccgagcuggggucuggauccggccucgacggcccuuaucagcccacaaccuucacgccucccaccgauuacuggauccugauuacaagcaacaccaaugggguuguguaugaaucuacaaacaauuccgacuuuuggaccgcugucaucgccguggagccucacgugaacccggucgaucgccaguacaauguuuucggagaaaacaagcaauuuaaugugagaaacgacagcgauaaauggaaguuccuugagauguuucgggggucuucccagaaugacuucuauaaccgcagaacgcugacaagcgacacccggcucgugggcauucugaaauacggaggccgcgucuggacauuucauggggagacccccagagccaccacagauuccucuaauacggcuaaccuggacggcaucagcaucaccauucacuccgaguucuacaucauuccucggagccaggaaucuaagugcaacgaauauaucaauaacggacucuga

SEQ ID NO: 556 - RNA, 1047 nt, Artificial Sequence
  derived and/or modified CDS sequence (opt5) from RVA/Wa-VirWa/P[8]__ACR22783.1__LumSynt_P2_VP8*(65-223)
augcagaucuacgagggcaagcugaccgccgaagggcucagauucggaauuguggcuagccgguuuaaccacgcccuggucgaccgccuuguugagggcgcgaucgaugcuauugugagacaugggggacgggaagaggacaucacacuggugcgcguccccggcuccugggaaauuccuguggccgccggggagcucgcuagaaaagaggauaucgacgccguuaucgcuauuggagugcugauccggggcgccacgccgcacuucgauuauauugcgucugaagucagcaagggccuugccgaccugucccucgagcugcgcaaacccaucaccuuuggggugauuacagcugauacccuggaacaagccaucgagagagcuggaacaaagcauggcaauaaagggugggaggccgcgcucucugccauugaaauggcuaaccuguucaagagccuucggggaggcuccgggggaucuggcggcagcgggggauccggcgggggacaguacaucaaggccaauagcaaauuuaucggcauuaccgagcuggggucuggauccggccucgacggcccuuaucagcccacaaccuucacgccucccaacgauuacuggauccugauuaauagcaacaccaaugggguuguguaugaaucuacaaacaauuccgacuuuuggaccgcugucguggccaucgagccucacgugaacccggucgaucgccaguacacaauuuucggagaaagcaagcaauuuaauguuagaaacgacucuaauaaauggaaguuccuugagauguuucgguccagcucccagaacgaguucuauaaucgcagaacccugacgucugauacacggcucgugggcauccugaaauacgggggacgcguguggaccuuucauggcgaaacacccagagccaccaccgacagcuccagcacagcuaaccugaacaauaucucuauuacgauccacuccgaguucuacauuaucccucggagccaggaaucuaagugcaacgaguauauuaauaacgggcucuga

SEQ ID NO: 557 - RNA, 1047 nt, Artificial Sequence
  derived and/or modified CDS sequence (opt5) from RVA/Wa/P[8]__AAA47290.1__LumSynt_P2_VP8*(65-223)
augcagaucuacgagggcaagcugaccgccgaagggcucagauucggaauuguggcuagccgguuuaaccacgcccuggucgaccgccuuguugagggcgcgaucgaugcuauugugagacaugggggacgggaagaggacaucacacuggugcgcguccccggcuccugggaaauuccuguggccgccggggagcucgcuagaaaagaggauaucgacgccguuaucgcuauuggagugcugauccggggcgccacgccgcacuucgauuauauugcgucugaagucagcaagggccuugccgaccugucccucgagcugcgcaaacccaucaccuuuggggugauuacagcugauacccuggaacaagccaucgagagagcuggaacaaagcauggcaauaaagggugggaggccgcgcucucugccauugaaauggcuaaccuguucaagagccuucggggaggcuccgggggaucuggcggcagcgggggauccggcgggggacaguacaucaaggccaauagcaaauuuaucggcauuaccgagcuggggucuggauccggccucgacggcccuuaucagcccacaaccuucacgccucccaacgauuacuggauccugauuaauagcaacaccaaugggguuguguaugaaucuacaaacaauuccgacuuuuggaccgcugucguggccaucgagccucacgugaacccggucgaucgccaguacacaauuuucggagaaagcaagcaauuuaauguuucuaacgacuccaauaaauggaaguuccuugagauguuuagaagcuccucucagaacgaguucuauaaucggcgcacccugacgagcgauacaagauuugugggcauccucaaauacgggggacggguguggaccuuccauggcgaaacaccccgcgccaccaccgacuccagcucuacagcuaaccugaacaauaucuccauuacgauccacagcgaguucuacauuaucccuagaucucaggaaagcaagugcaacgaguauauuaauaacgggcuguga

SEQ ID NO: 558 - RNA, 1047 nt, Artificial Sequence; identical to SEQ ID NO: 557
  derived and/or modified CDS sequence (opt5) from RVA/Wa/P[8]__AAA66953.1__LumSynt_P2_VP8*(65-223)

SEQ ID NO: 559 - RNA, 1119 nt, Artificial Sequence
  derived and/or modified CDS sequence (opt5) from RVA/BE1058/P[4]__AEX30665.1__LumSynt_P2_VP8*(41-223)
augcagaucuacgagggcaagcugaccgccgaagggcucagauucggaauuguggcuagccgguuuaaccacgcccuggucgaccgccuuguugagggcgcgaucgaugcuauugugagacaugggggacgggaagaggacaucacacuggugcgcguccccggcuccugggaaauuccuguggccgccggggagcucgcuagaaaagaggauaucgacgccguuaucgcuauuggagugcugauccggggcgccacgccgcacuucgauuauauugcgucugaagucagcaagggccuugccgaccugucccucgagcugcgcaaacccaucaccuuuggggugauuacagcugauacccuggaacaagccaucgagagagcuggaacaaagcauggcaauaaagggugggaggccgcgcucucugccauugaaauggcuaaccuguucaagagccuucggggaggcuccgggggaucuggcggcagcgggggauccggcgggggacaguacaucaaggccaauagcaaauuuaucggcauuaccgagcuggggucuggauccggcgcucagacacgcuaugccccuguuaacuggggccacggggaaaucaaugacagcaccacgguggagcccguccucgauggaccuuaccagcccaccacauucaagccuccgaacgacuauuggcugcuuauuucuuccaauaccgauggcgugguguacgaaagcacaaacaauucugacuuuuggaccgccgucaucgcuguugagccccaugugaaccaaacgaauagacaguaugugcuguucggggagaacaaacaguuuaauauugaaaacuccagcgauaaguggaaauucuuugagauguucaagggaaauucccagucugacuuuagcaaccggcgcacacucaccuccagcaacagacuggucggcaugcugaaguacgggggccggguguggacauuccacggagaaaccccucgcgcgaccacagacucuuccagcacggccgaucucaauaacaucucuaucauuauccacagcgaguucuacauuauccccagaucccaagaaucuaaaugcaaugaguauauuaacaauggccuguga

SEQ ID NO: 560 - RNA, 1119 nt, Artificial Sequence
  derived and/or modified CDS sequence (opt5) from RVA/DS-1/P[4]__CAD62680.1__LumSynt_P2_VP8*(41-223)
augcagaucuacgagggcaagcugaccgccgaagggcucagauucggaauuguggcuagccgguuuaaccacgcccuggucgaccgccuuguugagggcgcgaucgaugcuauugugagacaugggggacgggaagaggacaucacacuggugcgcguccccggcuccugggaaauuccuguggccgccggggagcucgcuagaaaagaggauaucgacgccguuaucgcuauuggagugcugauccggggcgccacgccgcacuucgauuauauugcgucugaagucagcaagggccuugccgaccugucccucgagcugcgcaaacccaucaccuuuggggugauuacagcugauacccuggaacaagccaucgagagagcuggaacaaagcauggcaauaaagggugggaggccgcgcucucugccauugaaauggcuaaccuguucaagagccuucggggaggcuccgggggaucuggcggcagcgggggauccggcgggggacaguacaucaaggccaauagcaaauuuaucggcauuaccgagcuggggucuggauccggcgcucagacacgcuaugccccuguuaacuggggcagcugggaaaucaaugacucuaccacgguggagcccguccucgaugggccuuaccagcccaccacauucaagccuccgaacgacuauuggcugcuuauuuccagcaauaccaacggagugguguacgaaucuacaaauaacaaugauuuuuggaccgccgucuccagcguugagccccacgugucccaaacgaacagacaguauauccuguucggcgagaauaaacaguuuaacguggaaaauaacucugacaaguggaaauucuuugagacauucaccgggagcucccagggaaacuuuagcaaucggcgcacacucaccucuuccaacagacuggucggcaugcugaaguacgggggccggguguggaccuuccauggagaaacaccucgcgcuacgaccgauagcucuaauacagcggaccucaacaauauuagcaucaucauucacuccgaguucuacaucauucccagaucucaagaaagcaagugcaacgaguauaucaauaacggccuguga

SEQ ID NO: 561 - RNA, 1119 nt, Artificial Sequence; identical to SEQ ID NO: 560
  derived and/or modified CDS sequence (opt5) from RVA/DS-1/P[4]__ABV53252.1__LumSynt_P2_VP8*(41-223)

SEQ ID NO: 562 - RNA, 1119 nt, Artificial Sequence
  derived and/or modified CDS sequence (opt5) from RVA/F01322/P[6]__AFA51886.1__LumSynt_P2_VP8*(41-223)
augcagaucuacgagggcaagcugaccgccgaagggcucagauucggaauuguggcuagccgguuuaaccacgcccuggucgaccgccuuguugagggcgcgaucgaugcuauugugagacaugggggacgggaagaggacaucacacuggugcgcguccccggcuccugggaaauuccuguggccgccggggagcucgcuagaaaagaggauaucgacgccguuaucgcuauuggagugcugauccggggcgccacgccgcacuucgauuauauugcgucugaagucagcaagggccuugccgaccugucccucgagcugcgcaaacccaucaccuuuggggugauuacagcugauacccuggaacaagccaucgagagagcuggaacaaagcauggcaauaaagggugggaggccgcgcucucugccauugaaauggcuaaccuguucaagagccuucggggaggcuccgggggaucuggcggcagcgggggauccggcgggggacaguacaucaaggccaauagcaaauuuaucggcauuaccgagcuggggucuggauccggcgcucagacaaacuaugccccuguuaccuggagccacggcgaagugaaugacucuacgaccaucgagcccguccucgaugggccuuaccagcccacaaacuucaagccuccgaaugacuauuggauucugcuuaaccccaccaaucaacagguggugcuggaaggaacaaacaaaaccgauaucugggucgcccuccugcugguugagccuaaugugacgaaccagucccgccaguacacacucuuuggcgagaccaagcaaauuacaguggaaaauaacaccaauaaauggaaguucuuugagauguucagaagcucugucuccgcugaauuucagcauaagcggacccugacaagcgacacgaaacuugcgggguucaugaaguuuuauaacuccguguggaccuuccacggagagacacccaacgccaccacagauuacucuagcaccuccaaucuguucgaaguugagacggugauccacgucgaguuuuacaucauuccucgcagccaggaaucuaaaugcuccgaguauaucaacacaggccucuga

SEQ ID NO: 563 - RNA, 1119 nt, Artificial Sequence
  derived and/or modified CDS sequence (opt5) from RVA/1076/P[6]__AAA47337.1__LumSynt_P2_VP8*(41-223)
augcagaucuacgagggcaagcugaccgccgaagggcucagauucggaauuguggcuagccgguuuaaccacgcccuggucgaccgccuuguugagggcgcgaucgaugcuauugugagacaugggggacgggaagaggacaucacacuggugcgcguccccggcuccugggaaauuccuguggccgccggggagcucgcuagaaaagaggauaucgacgccguuaucgcuauuggagugcugauccggggcgccacgccgcacuucgauuauauugcgucugaagucagcaagggccuugccgaccugucccucgagcugcgcaaacccaucaccuuuggggugauuacagcugauacccuggaacaagccaucgagagagcuggaacaaagcauggcaauaaagggugggaggccgcgcucucugccauugaaauggcuaaccuguucaagagccuucggggaggcuccgggggaucuggcggcagcgggggauccggcgggggacaguacaucaaggccaauagcaaauuuaucggcauuaccgagcuggggucuggauccggcgcucagacaaacuaugccccuguuaccuggagccacggcgaagugaaugacucuacgaccaucgagcccguccucgaugggccuuaccagcccacauccuucaagccuccgagcgacuauuggauucugcuuaaccccaccaaucaacagguggugcuggaaggaacaaacaaaaccgauaucugggucgcccuccugcugguugagccuaaugugacgaaccagucucgccaguacacacucuuuggcgagaccaagcaaauuacaguggaaaauaacaccaauaaauggaaguucuuugagauguucagauccagcgucuccgcugaauuucagcauaagcggacccugacaucugacacgaaacuugcgggguuccugaaguuuuauaacagcguguggaccuucuacggagagacaccccacgccaccacagauuacuccagcaccucuaaucucuccgaaguugagacggcuauccacguggaguucuauaucauuccucgcagccaggaaucuaaaugcaacgaguacaucaacacaggccuguga

SEQ ID NO: 564 - RNA, 1119 nt, Artificial Sequence
  derived and/or modified CDS sequence (opt5) from RVA/BE1128/P[8]__AEX30671.1__LumSynt_P2_VP8*(41-223)
augcagaucuacgagggcaagcugaccgccgaagggcucagauucggaauuguggcuagccgguuuaaccacgcccuggucgaccgccuuguugagggcgcgaucgaugcuauugugagacaugggggacgggaagaggacaucacacuggugcgcguccccggcuccugggaaauuccuguggccgccggggagcucgcuagaaaagaggauaucgacgccguuaucgcuauuggagugcugauccggggcgccacgccgcacuucgauuauauugcgucugaagucagcaagggccuugccgaccugucccucgagcugcgcaaacccaucaccuuuggggugauuacagcugauacccuggaacaagccaucgagagagcuggaacaaagcauggcaauaaagggugggaggccgcgcucucugccauugaaauggcuaaccuguucaagagccuucggggaggcuccgggggaucuggcggcagcgggggauccggcgggggacaguacaucaaggccaauagcaaauuuaucggcauuaccgagcuggggucuggauccggcgcucagacacgcuaugccccuguuaacuggggccacggggaaaucaaugacagcaccacgguggagcccauucucgauggaccuuaccagcccaccacauucaccccuccgacagacuauuggauccugauuaccucuaacacgaauggcgucguguacgaauccacaaacaauagcgauuuuuggaccgccgugaucgcugucgagccccauguuaacccuguggacagacaauauaauguguucggggagaacaagcaguuuaauguccggaacgauucugacaaauggaaguuccuugaaauguuucgcggauccagccagaaugacuucuacaacagacggacacugaccuccgauacccgccucgugggcauccugaaauacgggggcagaguuuggacauuucacggagagacgccccgggcgaccacagacucuagcaacaccgccaaucuggauggcauuuccaucacaauucacagcgaguucuauaucauuccuagaucucaggaauccaagugcaacgaauacaucaauaacgggcucuga

SEQ ID NO: 565 - RNA, 1119 nt, Artificial Sequence
  derived and/or modified CDS sequence (opt5) from RVA/Wa-VirWa/P[8]__ACR22783.1__LumSynt_P2_VP8*(41-223)
augcagaucuacgagggcaagcugaccgccgaagggcucagauucggaauuguggcuagccgguuuaaccacgcccuggucgaccgccuuguugagggcgcgaucgaugcuauugugagacaugggggacgggaagaggacaucacacuggugcgcguccccggcuccugggaaauuccuguggccgccggggagcucgcuagaaaagaggauaucgacgccguuaucgcuauuggagugcugauccggggcgccacgccgcacuucgauuauauugcgucugaagucagcaagggccuugccgaccugucccucgagcugcgcaaacccaucaccuuuggggugauuacagcugauacccuggaacaagccaucgagagagcuggaacaaagcauggcaauaaagggugggaggccgcgcucucugccauugaaauggcuaaccuguucaagagccuucggggaggcuccgggggaucuggcggcagcgggggauccggcgggggacaguacaucaaggccaauagcaaauuuaucggcauuaccgagcuggggucuggauccggcgcucagacacgcuaugccccuguuaacuggggccacggggaaaucaaugacagcaccacgguggagcccauucucgauggaccuuaccagcccaccacauucaccccuccgaacgacuauuggauccugauuaauucuaacacaaauggcgucguguacgaauccaccaacaauagcgauuuuuggacggccguggucgcuaucgagccccauguuaacccuguggacagacaauauacaaucuucggggagucuaagcaguuuaaugugcggaacgauuccaauaaauggaaguuccuugaaauguuucgcagcuccucucagaacgaguucuacaacagacggacccugacaagcgacacccgccucgucggcauucugaaauacggagggagaguguggaccuuucacggcgaaacaccccgggcgacgaccgacuccagcucuacagccaaucugaacaauaucuccauuaccauccacagcgaguucuauauuaucccuagaucucaggaaagcaagugcaacgaguacaucaauaacggacucuga

SEQ ID NO: 566 - RNA, 1119 nt, Artificial Sequence
  derived and/or modified CDS sequence (opt5) from RVA/Wa/P[8]__AAA47290.1__LumSynt_P2_VP8*(41-223)
augcagaucuacgagggcaagcugaccgccgaagggcucagauucggaauuguggcuagccgguuuaaccacgcccuggucgaccgccuuguugagggcgcgaucgaugcuauugugagacaugggggacgggaagaggacaucacacuggugcgcguccccggcuccugggaaauuccuguggccgccggggagcucgcuagaaaagaggauaucgacgccguuaucgcuauuggagugcugauccggggcgccacgccgcacuucgauuauauugcgucugaagucagcaagggccuugccgaccugucccucgagcugcgcaaacccaucaccuuuggggugauuacagcugauacccuggaacaagccaucgagagagcuggaacaaagcauggcaauaaagggugggaggccgcgcucucugccauugaaauggcuaaccuguucaagagccuucggggaggcuccgggggaucuggcggcagcgggggauccggcgggggacaguacaucaaggccaauagcaaauuuaucggcauuaccgagcuggggucuggauccggcgcucagacacgcuaugccccuguuaacuggggccacggggaaaucaaugacagcaccacgguggagcccauucucgauggaccuuaccagcccaccacauucaccccuccgaacgacuauuggauccugauuaauucuaacacaaauggcgucguguacgaauccaccaacaauagcgauuuuuggacggccguggucgcuaucgagccccauguuaacccuguggacagacaauauacaaucuucggggagucuaagcaguuuaauguguccaacgauagcaauaaauggaaguuccuugaaauguuucgguccucuagccagaacgaguucuacaaccgcagaacccugacauccgacacccgguuugucggcauucucaaauacggagggcgcguguggaccuuccacggcgaaacacccagagcgacgaccgacucuagcuccacagccaaucugaacaauaucagcauuaccauccacucugaguucuauauuaucccucggagccaggaauccaagugcaacgaguacaucaauaacggacuguga

SEQ ID NO: 567 - RNA, 1119 nt, Artificial Sequence
  derived and/or modified CDS sequence (opt5) from RVA/Wa/P[8]__AAA66953.1__LumSynt_P2_VP8*(41-223)
augcagaucuacgagggcaagcugaccgccgaagggcucagauucggaauuguggcuagccgguuuaaccacgcccuggucgaccgccuuguugagggcgcgaucgaugcuauugugagacaugggggacgggaagaggacaucacacuggugcgcguccccggcuccugggaaauuccuguggccgccggggagcucgcuagaaaagaggauaucgacgccguuaucgcuauuggagugcugauccggggcgccacgccgcacuucgauuauauugcgucugaagucagcaagggccuugccgaccugucccucgagcugcgcaaacccaucaccuuuggggugauuacagcugauacccuggaacaagccaucgagagagcuggaacaaagcauggcaauaaagggugggaggccgcgcucucugccauugaaauggcuaaccuguucaagagccuucggggaggcuccgggggaucuggcggcagcgggggauccggcgggggacaguacaucaaggccaauagcaaauuuaucggcauuaccgagcuggggucuggauccggcgcucagacacgcuaugccccuguuaacuggggccacggggaaaucaaugacagcaccacgguggagcccaugcucgauggaccuuaccagcccaccacauucaccccuccgaacgacuauuggauucugaucaauucuaacacaaauggcgucguguacgaauccaccaacaauagcgauuuuuggacggccguggucgcuauugagccccauguuaacccuguggacagacaauauacaaucuucggggagucuaagcaguuuaauguguccaacgauagcaauaaauggaaguuccuugaaauguuucgguccucuagccagaacgaguucuacaaccgcagaacccugacauccgacacccgguuugucggaauccucaaauacggcgggcgcguguggaccuuccacggcgaaacacccagagcgacgaccgacucuagcuccacagccaaucugaacaauauuagcaucaccauucacucugaguucuauaucauuccucggagccaggaauccaagugcaacgaguacaucaauaacggacuguga

SEQ ID NO: 568 - RNA, 594 nt, Artificial Sequence
  derived and/or modified CDS sequence (opt5) from RVA/BE1058/P[4]__AEX30665.1__SP-IgE_P2_VP8*(65-223)
auggacuggaccuggauccuguuccucguggccgcugccacaagaguccacagccaguacauuaaggcgaacuccaaauuuaucggcauuacggagcuggggucuggaagcggccuugaugggcccuaucaaccuaccacauucaagccgcccaaugacuacuggcugcucaucuccucuaacaccgauggaguuguguaugaaagcacaaauaacuccgacuuuuggaccgcugugauugccgucgagccucaugugaaucagacaaaccggcaguacguucuguucggcgaaaauaaacaguuuaacaucgaaaauucuagcgauaaguggaaauucuuugagauguucaaggggaacucccaaagcgacuuuucuaaucgcagaacccuuacguccagcaaccggcuggugggaaugcucaaguauggcggccgcgucuggaccuuccacggggagacacccagagccaccacagauucuuccagcaccgcugaccugaauaacaucucuauuaucauucauuccgaguuuuacaucauuccucggagccaggaauccaaaugcaaugaguauaucaacaacggacuguga

SEQ ID NO: 569 - RNA, 594 nt, Artificial Sequence
  derived and/or modified CDS sequence (opt5) from RVA/DS-1/P[4]__CAD62680.1__SP-IgE_P2_VP8*(65-223)
auggacuggaccuggauccuguuccucguggccgcugccacaagaguccacagccaguacauuaaggcgaacuccaaauuuaucggcauuacggagcuggggucuggaagcggccuugaugggcccuaucaaccuaccacauucaagccgcccaaugacuacuggcugcucaucuccucuaacaccaauggaguuguguaugaaagcacaaacaauaacgauuuuuggaccgcuguguccucugucgagccucaugugagccagacaaaucggcaguacauucuguucggcgaaaacaaacaguuuaauguugagaacaauuccgacaaguggaaauucuuugaaaccuucacggggagcucucaaggaaacuuuuccaaucgcagaacccuuacaagcucuaaccggcuggugggcaugcucaaguauggcgggcgcgucuggaccuuccacggagagacacccagagccaccacggauuccagcaauacagccgaccugaacaacaucucuaucauuauccauuccgaguuuuacauuaucccucggagccaggaauccaagugcaaugaguauauuaacaauggccuguga

SEQ ID NO: 570 - RNA, 594 nt, Artificial Sequence; identical to SEQ ID NO: 569
  derived and/or modified CDS sequence (opt5) from RVA/DS-1/P[4]__ABV53252.1__SP-IgE_P2_VP8*(65-223)

SEQ ID NO: 571 - RNA, 594 nt, Artificial Sequence
  derived and/or modified CDS sequence (opt5) from RVA/F01322/P[6]__AFA51886.1__SP-IgE_P2_VP8*(65-223)
auggacuggaccuggauccuguuccucguggccgcugccacaagaguccacagccaguacauuaaggcgaacuccaaauuuaucggcauuacggagcuggggucuggaagcggccuugaugggcccuaucaaccuaccaauuucaagccgcccaacgacuacuggauccugcucaauccuacaaaccagcagguugugcuggaaggaaccaauaaaacagauauuuggguggcccuucugcucgucgagcccaacgugaccaaucagucccggcaauauacacuguuuggcgaaaccaagcagaucacgguugagaacaauaccaacaaauggaaguucuuugaaauguuccgcucuagcguguccgcugaguuucagcauaagagaacacugaccucugacacaaaacucgccggguucaugaaguuuuacaauagcgucuggaccuuccacggagagacgccuaacgcuacaaccgauuauuccagcacaucuaaucuguuugaaguggagaccguuauccauguggaguucuacauuaucccccggucccaggaaagcaaaugcucugaguauauuaacaccggccuuuga

SEQ ID NO: 572 - RNA, 594 nt, Artificial Sequence
  derived and/or modified CDS sequence (opt5) from RVA/1076/P[6]__AAA47337.1__SP-IgE_P2_VP8*(65-223)
auggacuggaccuggauccuguuccucguggccgcugccacaagaguccacagccaguacauuaaggcgaacuccaaauuuaucggcauuacggagcuggggucuggaagcggccuugaugggcccuaucaaccuaccuccuucaagccgcccucugacuacuggauccugcucaauccuacaaaccagcagguugugcuggaaggaaccaauaaaacagauauuuggguggcccuucugcucgucgagcccaacgugaccaaucagagccggcaauauacacuguuuggcgaaaccaagcagaucacgguugagaacaauaccaacaaauggaaguucuuugaaauguuccgcuccucugugagcgcugaguuucagcauaagagaacacugaccuccgacacaaaacucgccggguuccugaaguuuuacaauagcgucuggaccuucuauggagagacgccucacgcuacaaccgauuacucuuccacaagcaaccuuucugaaguggagaccgccauccauguugaauuuuauauuaucccccggucccaggagagcaaaugcaaugaguacauuaacaccggccuguga

SEQ ID NO: 573 - RNA, 594 nt, Artificial Sequence
  derived and/or modified CDS sequence (opt5) from RVA/BE1128/P[8]__AEX30671.1__SP-IgE_P2_VP8*(65-223)
auggacuggaccuggauccuguuccucguggccgcugccacaagaguccacagccaguacauuaaggcgaacuccaaauuuaucggcauuacggagcuggggucuggaagcggccuugaugggcccuaucaaccuaccacauucaccccgcccacagacuacuggauccugauuaccuccaauacaaacggaguuguguaugaaucuaccaauaacagcgauuuuuggacggcugugaucgccgucgagccucaugugaaucccguugaccggcaguacaacguguucggcgaaaauaagcaguuuaacguccgcaaugauuccgacaaauggaaguuccucgagauguuuagagggucuagccagaacgauuucuauaaucggcgcacccugacauccgacaccagacuugugggaauccugaaauacggcggccggguuuggacauuucacggggaaaccccucgcgccacgacagauagcucuaacaccgcuaaucucgacggaauuuccaucacaauucauagcgaguucuauaucauucccagaucucaagaguccaagugcaacgaauacaucaauaacggccuguga

SEQ ID NO: 574 - RNA, 594 nt, Artificial Sequence
  derived and/or modified CDS sequence (opt5) from RVA/Wa-VirWa/P[8]__ACR22783.1__SP-IgE_P2_VP8*(65-223)
auggacuggaccuggauccuguuccucguggccgcugccacaagaguccacagccaguacauuaaggcgaacuccaaauuuaucggcauuacggagcuggggucuggaagcggccuugaugggcccuaucaaccuaccacauucaccccgcccaaugacuacuggauccugauuaacuccaauacaaacggaguuguguaugaaucuaccaauaacagcgauuuuuggacagcuguggucgccaucgagccucaugugaaucccguugaccggcaguacaccaucuucggcgaauccaagcaguuuaacgugcgcaaugauucuaacaaauggaaguuccucgagauguuuagaagcuccagccagaaugaguucuauaaccggcgcacgcugaccucugacacaagacuugucgggauucugaaauacggaggccggguguggaccuuucacggcgaaacaccucgcgccaccacggauuccagcucuacagcuaaucucaacaauaucuccauuaccauccauagcgaguucuauauuauccccagaucucaagaauccaagugcaacgaguacauuaacaaugggcuguga

SEQ ID NO: 575 - RNA, 594 nt, Artificial Sequence
  derived and/or modified CDS sequence (opt5) from RVA/Wa/P[8]__AAA47290.1__SP-IgE_P2_VP8*(65-223)
auggacuggaccuggauccuguuccucguggccgcugccacaagaguccacagccaguacauuaaggcgaacuccaaauuuaucggcauuacggagcuggggucuggaagcggccuugaugggcccuaucaaccuaccacauucaccccgcccaaugacuacuggauccugauuaacuccaauacaaacggaguuguguaugaaucuaccaauaacagcgauuuuuggacagcuguggucgccaucgagccucaugugaaucccguugaccggcaguacaccaucuucggcgaauccaagcaguuuaacgugucuaaugauagcaacaaauggaaguuccucgagauguuucgcuccagcucucagaaugaguucuauaacagacggacgcugaccuccgacacacgcuuugucgggauucuuaaauacggaggcagaguguggaccuuccacggcgaaacaccucgggccaccacggauucuagcuccacagcuaaucugaacaauaucagcauuaccauccauucugaguuuuauauuaucccccgcucccaagaaagcaagugcaacgaguacauuaacaaugggcucuga

SEQ ID NO: 576 - RNA, 594 nt, Artificial Sequence; identical to SEQ ID NO: 575
  derived and/or modified CDS sequence (opt5) from RVA/Wa/P[8]__AAA66953.1__SP-IgE_P2_VP8*(65-223)

SEQ ID NO: 577 - RNA, 666 nt, Artificial Sequence
  derived and/or modified CDS sequence (opt5) from RVA/BE1058/P[4]__AEX30665.1__SP-IgE_P2_VP8*(41-223)
auggacuggaccuggauccuguuccucguggccgcugccacaagaguccacagccaguacauuaaggcgaacuccaaauuuaucggcauuacggagcuggggucuggaagcggcgcucaaacccgguaugcccccguuaauugggggcauggagaaaucaacgauuccacaaccguggagccugugcuugacggcccguaccagcccacaaccuucaagccucccaaugauuauuggcugcucauuucuagcaacacagacggggucguguacgaauccaccaauaacucugauuuuuggacggccguuaucgcuguggagccucacgucaaucagaccaaccgccaguaugugcuguucggagaaaauaaacaauuuaacaucgagaauagcuccgacaaguggaaauucuuugagauguucaagggcaacagccagucugauuuuuccaauagacggacacuuaccagcucuaaccgccugguuggcaugcucaaguacgggggaagaguguggacauuccauggcgaaacgccccgggccaccacagacuccagcucuaccgcugaucugaauaacauuuccaucauuauccacagcgaguuuuauauuaucccucgcucccaggaaucuaaaugcaacgaguacauuaauaacgggcuguga

SEQ ID NO: 578 - RNA, 666 nt, Artificial Sequence
  derived and/or modified CDS sequence (opt5) from RVA/DS-1/P[4]__CAD62680.1__SP-IgE_P2_VP8*(41-223)
auggacuggaccuggauccuguuccucguggccgcugccacaagaguccacagccaguacauuaaggcgaacuccaaauuuaucggcauuacggagcuggggucuggaagcggcgcucaaacccgguaugcccccguuaauuggggguccugggaaaucaacgauucuacaaccguggagccugugcuugacggaccguaccagcccacaaccuucaagccucccaaugauuauuggcugcucauuagcuccaacacaaauggcgucguguacgaaucuaccaacaauaacgacuuuuggacggccguuagcuccguggagccucaugucagccagaccaaucgccaguauauccuguucggggaaaacaaacaauuuaauguggagaacaauucugauaaguggaaauucuuugagacauucaccggauccagccagggcaacuuuucuaauagacggacacuuaccuccagcaaccgccugguuggcaugcucaaguacgggggaagaguguggacguuccacggcgaaacaccccgggcuaccacagacucuuccaacaccgccgaucugaauaacaucagcauuaucauucauuccgaguuuuauaucauuccucgcucucaggaaagcaagugcaaugaguacaucaacaaugggcuguga

SEQ ID NO: 579 - RNA, 666 nt, Artificial Sequence; identical to SEQ ID NO: 578
  derived and/or modified CDS sequence (opt5) from RVA/DS-1/P[4]__ABV53252.1__SP-IgE_P2_VP8*(41-223)

SEQ ID NO: 580 - RNA, 666 nt, Artificial Sequence
  derived and/or modified CDS sequence (opt5) from RVA/F01322/P[6]__AFA51886.1__SP-IgE_P2_VP8*(41-223)
auggacuggaccuggauccuguuccucguggccgcugccacaagaguccacagccaguacauuaaggcgaacuccaaauuuaucggcauuacggagcuggggucuggaagcggcgcucaaaccaauuaugcccccguuacauggucccauggggaagugaacgauucuaccacaaucgagccugugcuugacggaccguaccagcccaccaauuucaagccucccaacgauuauuggauucugcucaauccuacaaaccagcaggucgugcuggaaggcaccaauaaaacggacaucuggguugcccuucugcucguggagcccaacgucaccaaucaaagccggcaguacacacuguuuggggaaaccaagcagaucacaguggagaacaauaccaacaaauggaaguucuuugagauguuccgcuccucuguuagcgcugaauuucagcacaagagaacgcugacauccgauaccaaacucgccggauucaugaaguuuuauaauagcguguggacauuccauggcgagaccccuaacgcuaccacagacuacucuuccacgagcaaucuguuugaagucgagaccgugauucacguggaguucuauaucauuccgcggucucaagaauccaaaugcagcgaguacaucaacacaggccuuuga

SEQ ID NO: 581 - RNA, 666 nt, Artificial Sequence
  derived and/or modified CDS sequence (opt5) from RVA/1076/P[6]__AAA47337.1__SP-IgE_P2_VP8*(41-223)
auggacuggaccuggauccuguuccucguggccgcugccacaagaguccacagccaguacauuaaggcgaacuccaaauuuaucggcauuacggagcuggggucuggaagcggcgcucaaaccaauuaugcccccguuacauggucccauggggaagugaacgauucuaccacaaucgagccugugcuugacggaccguaccagcccaccagcuucaagccucccuccgauuauuggauucugcucaauccuacaaaccagcaggucgugcuggaaggcaccaauaaaacggacaucuggguugcccuucugcucguggagcccaacgucaccaaucaaucucggcaguacacacuguuuggggaaaccaagcagaucacaguggagaacaauaccaacaaauggaaguucuuugagauguuccgcagcuccguuagcgcugaauuucagcacaagagaacgcugacaucugauaccaaacucgccggauuccugaaguuuuauaauuccguguggacauucuacggcgagaccccucaugcuaccacagacuauagcucuacguccaaccuuagcgaagucgagaccgccauucacguggaguuuuacaucauuccgcggucucaagaauccaaaugcaaugaguacaucaacacaggccuguga

SEQ ID NO: 582 - RNA, 666 nt, Artificial Sequence
  derived and/or modified CDS sequence (opt5) from RVA/BE1128/P[8]__AEX30671.1__SP-IgE_P2_VP8*(41-223)
auggacuggaccuggauccuguuccucguggccgcugccacaagaguccacagccaguacauuaaggcgaacuccaaauuuaucggcauuacggagcuggggucuggaagcggcgcucaaacccgguaugcccccguuaauugggggcauggagaaaucaacgauuccacaaccguggagccuauucuugacggcccguaccagcccacaaccuucacaccucccaccgauuauuggauccugaucacgucuaauaccaacgggguggucuacgaaagcacaaauaacuccgacuuuuggaccgccgugauugcuguugagccucacgugaaucccgucgaucgccaguauaacguguucggagaaaauaagcaguuuaacguuagaaaugacucugauaaauggaaguuccucgagauguuucggggcagcucccaaaacgacuucuacaaucgcagaacacugaccagcgauacgcggcuugugggcauccugaaauaugggggacgcgucuggacauuucauggcgagaccccuagagccacaaccgacucuuccaacaccgcuaaucucgaugggauuagcaucacaauucacucugaguucuacaucauuccgcggucccaggaaagcaagugcaacgaauacaucaacaauggacuguga

SEQ ID NO: 583 - RNA, 666 nt, Artificial Sequence
  derived and/or modified CDS sequence (opt5) from RVA/Wa-VirWa/P[8]__ACR22783.1__SP-IgE_P2_VP8*(41-223)
auggacuggaccuggauccuguuccucguggccgcugccacaagaguccacagccaguacauuaaggcgaacuccaaauuuaucggcauuacggagcuggggucuggaagcggcgcucaaacccgguaugcccccguuaauugggggcauggagaaaucaacgauuccacaaccguggagccuauucuugacggcccguaccagcccacaaccuucacaccucccaaugauuauuggauccugaucaacucuaauaccaacgggguggucuacgaaagcacgaauaacuccgacuuuuggaccgccgugguugcuauugagccucacgugaaucccgucgaucgccaguauacaaucuucggagaaucuaagcaguuuaacgugagaaaugacagcaacaaauggaaguuccucgagauguuucgguccagcucucaaaaugaguucuacaaccgcagaacccugacauccgauacccggcuuguuggcauucugaaauauggcgggcgcguguggacguuucauggagaaacaccuagagccaccacagacucuagcuccaccgcuaaucucaacaacaucagcauuaccauccacucugaguucuacauuaucccgcggucccaggaaagcaagugcaaugaguacaucaacaauggccuguga

SEQ ID NO: 584 - RNA, 666 nt, Artificial Sequence
  derived and/or modified CDS sequence (opt5) from RVA/Wa/P[8]__AAA47290.1__SP-IgE_P2_VP8*(41-223)
auggacuggaccuggauccuguuccucguggccgcugccacaagaguccacagccaguacauuaaggcgaacuccaaauuuaucggcauuacggagcuggggucuggaagcggcgcucaaacccgguaugcccccguuaauugggggcauggagaaaucaacgauuccacaaccguggagccuauucuugacggcccguaccagcccacaaccuucacaccucccaaugauuauuggauccugaucaacucuaauaccaacgggguggucuacgaaagcacgaauaacuccgacuuuuggaccgccgugguugcuauugagccucacgugaaucccgucgaucgccaguauacaaucuucggagaaucuaagcaguuuaacgugagcaaugacuccaacaaauggaaguuccucgagauguuuagaucuagcucccaaaaugaguucuacaaccggcgcacccugacaagcgauaccagauuuguuggcauucuuaaauauggcgggcggguguggacguuccauggagaaacaccucgcgccaccacagacucuuccagcaccgcuaaucugaacaacaucucuauuaccauccacuccgaguuuuacauuaucccgagaagccaggaauccaagugcaaugaguacaucaacaauggccucuga

SEQ ID NO: 585 - RNA, 666 nt, Artificial Sequence
  derived and/or modified CDS sequence (opt5) from RVA/Wa/P[8]__AAA66953.1__SP-IgE_P2_VP8*(41-223)
auggacuggaccuggauccuguuccucguggccgcugccacaagaguccacagccaguacauuaaggcgaacuccaaauuuaucggcauuacggagcuggggucuggaagcggcgcucaaacccgguaugcccccguuaauugggggcauggagaaaucaacgauuccacaaccguggagccuaugcuugacggcccguaccagcccacaaccuucacaccucccaaugauuauuggauucugaucaacucuaauaccaacgggguggucuacgaaagcacgaauaacuccgacuuuuggaccgccgugguugcuaucgagccucacgugaaucccgucgaucgccaguauacaauuuucggagaaucuaagcaguuuaacgugagcaaugacuccaacaaauggaaguuccucgagauguuuagaucuagcucccaaaaugaguucuacaaccggcgcacccugacaagcgauaccagauuuguuggcauccuuaaauauggcgggcggguguggacguuccauggagaaacaccucgcgccaccacagacucuuccagcaccgcuaaucugaacaacauuucuaucaccauucacuccgaguuuuacaucauuccgagaagccaggaauccaagugcaaugaguacaucaacaauggccucuga

SEQ ID NO: 586 - RNA, 791 nt, Artificial Sequence
  mRNA product Design a-1 (A100) comprising derived and/or modified sequence from RVA/BE1058/P[4]__AEX30665.1__P2_VP8*(65-223) (opt1)
aggagagucccgcagucggcguccagcggcucugcuuguucgugugugugucguugcaggccuuauucaagcuuaccaugcaguacaucaaggccaacagcaaguucaucggcaucaccgagcugggcagcggguccggccucgacggccccuaccagcccacgaccuucaagccgcccaacgacuacuggcugcugaucuccagcaacaccgacgggguggucuacgaguccaccaacaacagcgacuucuggacggccgugaucgccguggagccccacgucaaccagaccaaccgccaguacgugcuguucggcgagaacaagcaguucaacaucgagaacuccagcgacaaguggaaguucuucgagauguucaagggcaacucccagagcgacuucuccaaccggcgcacccugaccagcuccaaccggcugguggggaugcucaaguacggcgggcgcgucuggacguuccacggcgagaccccgcgggccaccaccgacagcuccagcacggccgaccugaacaacaucuccaucaucauccacagcgaguucuacaucaucccccgcagccaggaguccaagugcaacgaguacaucaacaacgggcugugaggacuagucccuguucccagagcccacuuuuuuuucuuuuuuugaaauaaaauagccugucuuucagaucuaaaaaaaaaaaaaaaaaaaaaaaaaaaaaaaaaaaaaaaaaaaaaaaaaaaaaaaaaaaaaaaaaaaaaaaaaaaaaaaaaaaaaaaaaaaaaaaaaaaa

SEQ ID NO: 587 - RNA, 791 nt, Artificial Sequence
  mRNA product Design a-1 (A100) comprising derived and/or modified sequence from RVA/DS-1/P[4]__CAD62680.1__P2_VP8*(65-223) (opt1)
aggagagucccgcagucggcguccagcggcucugcuuguucgugugugugucguugcaggccuuauucaagcuuaccaugcaguacaucaaggccaacagcaaguucaucggcaucaccgagcugggcagcggguccggccucgacgggcccuaccagccgacgaccuucaagccgcccaacgacuacuggcugcugaucuccagcaacaccaacggcguggucuacgaguccaccaacaacaacgacuucuggacggccgugagcuccguggagccccacgucagccagaccaaccgccaguacauccucuucggggagaacaagcaguucaacguggagaacaacuccgacaaguggaaguucuucgagaccuucaccggcagcucccagggcaacuucagcaaccggcgcacgcugaccuccagcaaccggcugguggggaugcucaaguacggcgggcgcgucuggaccuuccacggcgagacgccccgggccaccaccgacuccagcaacaccgccgaccugaacaacaucagcaucaucauccacuccgaguucuacaucaucccccgcagccaggaguccaagugcaacgaguacaucaacaacgggcugugaggacuagucccuguucccagagcccacuuuuuuuucuuuuuuugaaauaaaauagccugucuuucagaucuaaaaaaaaaaaaaaaaaaaaaaaaaaaaaaaaaaaaaaaaaaaaaaaaaaaaaaaaaaaaaaaaaaaaaaaaaaaaaaaaaaaaaaaaaaaaaaaaaaaa

SEQ ID NO: 588 - RNA, 791 nt, Artificial Sequence; identical to SEQ ID NO: 587
  mRNA product Design a-1 (A100) comprising derived and/or modified sequence from RVA/DS-1/P[4]__ABV53252.1__P2_VP8*(65-223) (opt1)

SEQ ID NO: 589 - RNA, 791 nt, Artificial Sequence
  mRNA product Design a-1 (A100) comprising derived and/or modified sequence from RVA/F01322/P[6]__AFA51886.1__P2_VP8*(65-223) (opt1)
aggagagucccgcagucggcguccagcggcucugcuuguucgugugugugucguugcaggccuuauucaagcuuaccaugcaguacaucaaggccaacagcaaguucaucggcaucaccgagcugggcagcggguccggccucgacgggcccuaccagccgaccaacuucaagccgcccaacgacuacuggauccugcugaaccccaccaaccagcagguggugcucgagggcacgaacaagaccgacaucugggucgcccugcugcucguggagccgaacgugaccaaccagagccggcaguacacccuguucggggagacgaagcagaucaccgucgagaacaacaccaacaaguggaaguucuucgagauguuccgcuccagcguguccgccgaguuccagcacaagcggacccugacgagcgacaccaagcucgccggcuucaugaaguucuacaacuccguguggaccuuccacggcgagacccccaacgccacgaccgacuacagcuccaccagcaaccuguucgaggucgagaccgugauccacguggaguucuacaucaucccccgcucccaggagagcaagugcuccgaguacaucaacacggggcugugaggacuagucccuguucccagagcccacuuuuuuuucuuuuuuugaaauaaaauagccugucuuucagaucuaaaaaaaaaaaaaaaaaaaaaaaaaaaaaaaaaaaaaaaaaaaaaaaaaaaaaaaaaaaaaaaaaaaaaaaaaaaaaaaaaaaaaaaaaaaaaaaaaaaa

SEQ ID NO: 590 - RNA, 791 nt, Artificial Sequence
  mRNA product Design a-1 (A100) comprising derived and/or modified sequence from RVA/1076/P[6]__AAA47337.1__P2_VP8*(65-223) (opt1)
aggagagucccgcagucggcguccagcggcucugcuuguucgugugugugucguugcaggccuuauucaagcuuaccaugcaguacaucaaggccaacagcaaguucaucggcaucaccgagcugggcagcggguccggccucgacgggcccuaccagccgaccuccuucaagccgcccagcgacuacuggauccugcugaaccccaccaaccagcaggucgugcucgagggcacgaacaagaccgacaucuggguggcccugcugcucguggagcccaacgugaccaaccagucccggcaguacacccuguucggggagacgaagcagaucaccgucgagaacaacaccaacaaguggaaguucuucgagauguuccgcagcuccgugagcgccgaguuccagcacaagcggacccugacguccgacaccaagcucgccggcuuccugaaguucuacaacagcguguggaccuucuacggcgagacgccccacgccaccaccgacuacuccagcaccuccaaccugagcgaggucgagaccgcgauccacguggaguucuacaucaucccccgcucccaggagagcaagugcaacgaguacaucaacacggggcugugaggacuagucccuguucccagagcccacuuuuuuuucuuuuuuugaaauaaaauagccugucuuucagaucuaaaaaaaaaaaaaaaaaaaaaaaaaaaaaaaaaaaaaaaaaaaaaaaaaaaaaaaaaaaaaaaaaaaaaaaaaaaaaaaaaaaaaaaaaaaaaaaaaaaa

SEQ ID NO: 591 - RNA, 791 nt, Artificial Sequence
  mRNA product Design a-1 (A100) comprising derived and/or modified sequence from RVA/BE1128/P[8]__AEX30671.1__P2_VP8*(65-223) (opt1) R8131/R8580/R8581
aggagagucccgcagucggcguccagcggcucugcuuguucgugugugugucguugcaggccuuauucaagcuuaccaugcaguacaucaaggccaacagcaaguucaucggcaucaccgagcugggcagcggguccggccucgacggcccguaccagccgacgaccuucaccccgcccaccgacuacuggauccugaucacguccaacaccaacggggugguguacgagagcaccaacaacuccgacuucuggaccgccgucaucgccguggagccccacgugaacccggucgaccgccaguacaacguguucggcgagaacaagcaguucaacgugcggaacgacagcgacaaguggaaguuccuggagauguuccgcggcuccagccagaacgacuucuacaaccggcgcacgcucaccuccgacacccggcuggucgggauccugaaguacggcgggcgcguguggaccuuccacggcgagacgccccgggccaccaccgacagcuccaacaccgccaaccucgacgggaucagcaucacgauccacuccgaguucuacaucaucccccgcagccaggaguccaagugcaacgaguacaucaacaacggccugugaggacuagucccuguucccagagcccacuuuuuuuucuuuuuuugaaauaaaauagccugucuuucagaucuaaaaaaaaaaaaaaaaaaaaaaaaaaaaaaaaaaaaaaaaaaaaaaaaaaaaaaaaaaaaaaaaaaaaaaaaaaaaaaaaaaaaaaaaaaaaaaaaaaaa

SEQ ID NO: 592 - RNA, 791 nt, Artificial Sequence
  mRNA product Design a-1 (A100) comprising derived and/or modified sequence from RVA/Wa-VirWa/P[8]__ACR22783.1__P2_VP8*(65-223) (opt1)
aggagagucccgcagucggcguccagcggcucugcuuguucgugugugugucguugcaggccuuauucaagcuuaccaugcaguacaucaaggccaacagcaaguucaucggcaucaccgagcugggcagcggguccggccucgacgggcccuaccagccgacgaccuucaccccgcccaacgacuacuggauccugaucaacagcaacaccaacggcgucguguacgaguccacgaacaacagcgacuucuggaccgccguggucgccaucgagccccacgugaacccgguggaccgccaguacaccaucuucggggaguccaagcaguucaacguccggaacgacagcaacaaguggaaguuccuggagauguuccgcuccagcucccagaacgaguucuacaaccggcgcacccucacgagcgacacccggcuggugggcauccugaaguacggcgggcgcguguggaccuuccacggcgagaccccgcgggccacgaccgacuccagcuccaccgccaaccucaacaacaucagcaucaccauccacuccgaguucuacaucaucccccgcagccaggagagcaagugcaacgaguacaucaacaacgggcugugaggacuagucccuguucccagagcccacuuuuuuuucuuuuuuugaaauaaaauagccugucuuucagaucuaaaaaaaaaaaaaaaaaaaaaaaaaaaaaaaaaaaaaaaaaaaaaaaaaaaaaaaaaaaaaaaaaaaaaaaaaaaaaaaaaaaaaaaaaaaaaaaaaaaa

SEQ ID NO: 593 - RNA, 791 nt, Artificial Sequence
  mRNA product Design a-1 (A100) comprising derived and/or modified sequence from RVA/Wa/P[8]__AAA47290.1__P2_VP8*(65-223) (opt1)
aggagagucccgcagucggcguccagcggcucugcuuguucgugugugugucguugcaggccuuauucaagcuuaccaugcaguacaucaaggccaacagcaaguucaucggcaucaccgagcugggcagcggguccggccucgacgggcccuaccagccgacgaccuucaccccgcccaacgacuacuggauccugaucaacagcaacaccaacggcgucguguacgaguccacgaacaacagcgacuucuggaccgccguggucgccaucgagccccacgugaaccccguggaccgccaguacaccaucuucggggaguccaagcaguucaacgucagcaacgacuccaacaaguggaaguuccuggagauguuccggagcuccagccagaacgaguucuacaaccgccggacccucacguccgacacccgcuucgugggcauccugaaguacggcgggcggguguggaccuuccacggcgagacgccccgcgccaccaccgacagcuccagcaccgccaaccugaacaacaucuccaucaccauccacagcgaguucuacaucaucccccggagccaggaguccaagugcaacgaguacaucaacaacgggcugugaggacuagucccuguucccagagcccacuuuuuuuucuuuuuuugaaauaaaauagccugucuuucagaucuaaaaaaaaaaaaaaaaaaaaaaaaaaaaaaaaaaaaaaaaaaaaaaaaaaaaaaaaaaaaaaaaaaaaaaaaaaaaaaaaaaaaaaaaaaaaaaaaaaaa

SEQ ID NO: 594 - RNA, 791 nt, Artificial Sequence; identical to SEQ ID NO: 593
  mRNA product Design a-1 (A100) comprising derived and/or modified sequence from RVA/Wa/P[8]__AAA66953.1__P2_VP8*(65-223) (opt1)

SEQ ID NO: 595 - RNA, 863 nt, Artificial Sequence
  mRNA product Design a-1 (A100) comprising derived and/or modified sequence from RVA/BE1058/P[4]__AEX30665.1__P2_VP8*(41-223) (opt1)
aggagagucccgcagucggcguccagcggcucugcuuguucgugugugugucguugcaggccuuauucaagcuuaccaugcaguacaucaaggccaacagcaaguucaucggcaucaccgagcugggcagcggguccggcgcccagacccgguacgcgcccgugaacuggggccacggggagaucaacgacagcaccaccgucgagcccgugcucgacggccccuaccagcccacgaccuucaagccgcccaacgacuacuggcugcugaucuccagcaacaccgacgggguggucuacgaguccaccaacaacagcgacuucuggacggccgugaucgccguggagccccacgucaaccagaccaaccgccaguacgugcuguucggcgagaacaagcaguucaacaucgagaacuccagcgacaaguggaaguucuucgagauguucaagggcaacucccagagcgacuucuccaaccggcgcacccugaccagcuccaaccggcugguggggaugcucaaguacggcgggcgcgucuggacguuccacggcgagaccccgcgggccaccaccgacagcuccagcacggccgaccugaacaacaucuccaucaucauccacagcgaguucuacaucaucccccgcagccaggaguccaagugcaacgaguacaucaacaacgggcugugaggacuagucccuguucccagagcccacuuuuuuuucuuuuuuugaaauaaaauagccugucuuucagaucuaaaaaaaaaaaaaaaaaaaaaaaaaaaaaaaaaaaaaaaaaaaaaaaaaaaaaaaaaaaaaaaaaaaaaaaaaaaaaaaaaaaaaaaaaaaaaaaaaaaa

SEQ ID NO: 596 - RNA, 863 nt, Artificial Sequence
  mRNA product Design a-1 (A100) comprising derived and/or modified sequence from RVA/DS-1/P[4]__CAD62680.1__P2_VP8*(41-223) (opt1)
aggagagucccgcagucggcguccagcggcucugcuuguucgugugugugucguugcaggccuuauucaagcuuaccaugcaguacaucaaggccaacagcaaguucaucggcaucaccgagcugggcagcggguccggcgcccagacccgguacgcgcccgugaacuggggcuccugggagaucaacgacagcaccaccgucgagcccgugcucgacgggcccuaccagccgacgaccuucaagccgcccaacgacuacuggcugcugaucuccagcaacaccaacggcguggucuacgaguccaccaacaacaacgacuucuggacggccgugagcuccguggagccccacgucagccagaccaaccgccaguacauccucuucggggagaacaagcaguucaacguggagaacaacuccgacaaguggaaguucuucgagaccuucaccggcagcucccagggcaacuucagcaaccggcgcacgcugaccuccagcaaccggcugguggggaugcucaaguacggcgggcgcgucuggaccuuccacggcgagacgccccgggccaccaccgacuccagcaacaccgccgaccugaacaacaucagcaucaucauccacuccgaguucuacaucaucccccgcagccaggaguccaagugcaacgaguacaucaacaacgggcugugaggacuagucccuguucccagagcccacuuuuuuuucuuuuuuugaaauaaaauagccugucuuucagaucuaaaaaaaaaaaaaaaaaaaaaaaaaaaaaaaaaaaaaaaaaaaaaaaaaaaaaaaaaaaaaaaaaaaaaaaaaaaaaaaaaaaaaaaaaaaaaaaaaaaa

SEQ ID NO: 597 - RNA, 863 nt, Artificial Sequence; identical to SEQ ID NO: 596
  mRNA product Design a-1 (A100) comprising derived and/or modified sequence from RVA/DS-1/P[4]__ABV53252.1__P2_VP8*(41-223) (opt1)

SEQ ID NO: 598 - RNA, 863 nt, Artificial Sequence
  mRNA product Design a-1 (A100) comprising derived and/or modified sequence from RVA/F01322/P[6]__AFA51886.1__P2_VP8*(41-223) (opt1)
aggagagucccgcagucggcguccagcggcucugcuuguucgugugugugucguugcaggccuuauucaagcuuaccaugcaguacaucaaggccaacagcaaguucaucggcaucaccgagcugggcagcggguccggcgcccagaccaacuacgcgcccgugaccuggagccacggcgaggugaacgacuccacgaccaucgagcccguccucgacgggcccuaccagccgaccaacuucaagccgcccaacgacuacuggauccugcugaaccccaccaaccagcagguggugcucgagggcacgaacaagaccgacaucugggucgcccugcugcucguggagccgaacgugaccaaccagagccggcaguacacccuguucggggagacgaagcagaucaccgucgagaacaacaccaacaaguggaaguucuucgagauguuccgcuccagcguguccgccgaguuccagcacaagcggacccugacgagcgacaccaagcucgccggcuucaugaaguucuacaacuccguguggaccuuccacggcgagacccccaacgccacgaccgacuacagcuccaccagcaaccuguucgaggucgagaccgugauccacguggaguucuacaucaucccccgcucccaggagagcaagugcuccgaguacaucaacacggggcugugaggacuagucccuguucccagagcccacuuuuuuuucuuuuuuugaaauaaaauagccugucuuucagaucuaaaaaaaaaaaaaaaaaaaaaaaaaaaaaaaaaaaaaaaaaaaaaaaaaaaaaaaaaaaaaaaaaaaaaaaaaaaaaaaaaaaaaaaaaaaaaaaaaaaa

SEQ ID NO: 599 - RNA, 863 nt, Artificial Sequence
  mRNA product Design a-1 (A100) comprising derived and/or modified sequence from RVA/1076/P[6]__AAA47337.1__P2_VP8*(41-223) (opt1)
aggagagucccgcagucggcguccagcggcucugcuuguucgugugugugucguugcaggccuuauucaagcuuaccaugcaguacaucaaggccaacagcaaguucaucggcaucaccgagcugggcagcggguccggcgcccagaccaacuacgcgcccgugaccuggagccacggcgaggugaacgacagcacgaccaucgagcccguccucgacgggcccuaccagccgaccuccuucaagccgcccagcgacuacuggauccugcugaaccccaccaaccagcaggucgugcucgagggcacgaacaagaccgacaucuggguggcccugcugcucguggagcccaacgugaccaaccagucccggcaguacacccuguucggggagacgaagcagaucaccgucgagaacaacaccaacaaguggaaguucuucgagauguuccgcagcuccgugagcgccgaguuccagcacaagcggacccugacguccgacaccaagcucgccggcuuccugaaguucuacaacagcguguggaccuucuacggcgagacgccccacgccaccaccgacuacuccagcaccuccaaccugagcgaggucgagaccgcgauccacguggaguucuacaucaucccccgcucccaggagagcaagugcaacgaguacaucaacacggggcugugaggacuagucccuguucccagagcccacuuuuuuuucuuuuuuugaaauaaaauagccugucuuucagaucuaaaaaaaaaaaaaaaaaaaaaaaaaaaaaaaaaaaaaaaaaaaaaaaaaaaaaaaaaaaaaaaaaaaaaaaaaaaaaaaaaaaaaaaaaaaaaaaaaaaa

SEQ ID NO: 600 - RNA, 863 nt, Artificial Sequence
  mRNA product Design a-1 (A100) comprising derived and/or modified sequence from RVA/BE1128/P[8]__AEX30671.1__P2_VP8*(41-223) (opt1)
aggagagucccgcagucggcguccagcggcucugcuuguucgugugugugucguugcaggccuuauucaagcuuaccaugcaguacaucaaggccaacagcaaguucaucggcaucaccgagcugggcagcggguccggcgcccagacccgguacgcgcccgugaacuggggccacggggagaucaacgacagcaccaccgucgagcccauccucgacggcccguaccagccgacgaccuucaccccgcccaccgacuacuggauccugaucacguccaacaccaacggggugguguacgagagcaccaacaacuccgacuucuggaccgccgucaucgccguggagccccacgugaacccggucgaccgccaguacaacguguucggcgagaacaagcaguucaacgugcggaacgacagcgacaaguggaaguuccuggagauguuccgcggcuccagccagaacgacuucuacaaccggcgcacgcucaccuccgacacccggcuggucgggauccugaaguacggcgggcgcguguggaccuuccacggcgagacgccccgggccaccaccgacagcuccaacaccgccaaccucgacgggaucagcaucacgauccacuccgaguucuacaucaucccccgcagccaggaguccaagugcaacgaguacaucaacaacggccugugaggacuagucccuguucccagagcccacuuuuuuuucuuuuuuugaaauaaaauagccugucuuucagaucuaaaaaaaaaaaaaaaaaaaaaaaaaaaaaaaaaaaaaaaaaaaaaaaaaaaaaaaaaaaaaaaaaaaaaaaaaaaaaaaaaaaaaaaaaaaaaaaaaaaa

SEQ ID NO: 601 - RNA, 863 nt, Artificial Sequence
  mRNA product Design a-1 (A100) comprising derived and/or modified sequence from RVA/Wa-VirWa/P[8]__ACR22783.1__P2_VP8*(41-223) (opt1)
aggagagucccgcagucggcguccagcggcucugcuuguucgugugugugucguugcaggccuuauucaagcuuaccaugcaguacaucaaggccaacagcaaguucaucggcaucaccgagcugggcagcggguccggcgcccagacccgguacgcgcccgugaacugggggcacggcgagaucaacgacuccaccaccguggagcccauccucgacgggcccuaccagccgacgaccuucaccccgcccaacgacuacuggauccugaucaacagcaacaccaacggcgucguguacgaguccacgaacaacagcgacuucuggaccgccguggucgccaucgagccccacgugaacccgguggaccgccaguacaccaucuucggggaguccaagcaguucaacguccggaacgacagcaacaaguggaaguuccuggagauguuccgcuccagcucccagaacgaguucuacaaccggcgcacccucacgagcgacacccggcuggugggcauccugaaguacggcgggcgcguguggaccuuccacggcgagaccccgcgggccacgaccgacuccagcuccaccgccaaccucaacaacaucagcaucaccauccacuccgaguucuacaucaucccccgcagccaggagagcaagugcaacgaguacaucaacaacgggcugugaggacuagucccuguucccagagcccacuuuuuuuucuuuuuuugaaauaaaauagccugucuuucagaucuaaaaaaaaaaaaaaaaaaaaaaaaaaaaaaaaaaaaaaaaaaaaaaaaaaaaaaaaaaaaaaaaaaaaaaaaaaaaaaaaaaaaaaaaaaaaaaaaaaaa

SEQ ID NO: 602 - RNA, 863 nt, Artificial Sequence
  mRNA product Design a-1 (A100) comprising derived and/or modified sequence from RVA/Wa/P[8]__AAA47290.1__P2_VP8*(41-223) (opt1)
aggagagucccgcagucggcguccagcggcucugcuuguucgugugugugucguugcaggccuuauucaagcuuaccaugcaguacaucaaggccaacagcaaguucaucggcaucaccgagcugggcagcggguccggcgcccagacccgguacgcgcccgugaacugggggcacggcgagaucaacgacuccaccaccguggagcccauccucgacgggcccuaccagccgacgaccuucaccccgcccaacgacuacuggauccugaucaacagcaacaccaacggcgucguguacgaguccacgaacaacagcgacuucuggaccgccguggucgccaucgagccccacgugaaccccguggaccgccaguacaccaucuucggggaguccaagcaguucaacgucagcaacgacuccaacaaguggaaguuccuggagauguuccggagcuccagccagaacgaguucuacaaccgccggacccucacguccgacacccgcuucgugggcauccugaaguacggcgggcggguguggaccuuccacggcgagacgccccgcgccaccaccgacagcuccagcaccgccaaccugaacaacaucuccaucaccauccacagcgaguucuacaucaucccccggagccaggaguccaagugcaacgaguacaucaacaacgggcugugaggacuagucccuguucccagagcccacuuuuuuuucuuuuuuugaaauaaaauagccugucuuucagaucuaaaaaaaaaaaaaaaaaaaaaaaaaaaaaaaaaaaaaaaaaaaaaaaaaaaaaaaaaaaaaaaaaaaaaaaaaaaaaaaaaaaaaaaaaaaaaaaaaaaa

SEQ ID NO: 603 - RNA, 863 nt, Artificial Sequence
  mRNA product Design a-1 (A100) comprising derived and/or modified sequence from RVA/Wa/P[8]__AAA66953.1__P2_VP8*(41-223) (opt1)
aggagagucccgcagucggcguccagcggcucugcuuguucgugugugugucguugcaggccuuauucaagcuuaccaugcaguacaucaaggccaacagcaaguucaucggcaucaccgagcugggcagcggguccggcgcccagacccgguacgcgcccgugaacugggggcacggcgagaucaacgacuccaccaccguggagcccaugcucgacgggcccuaccagccgacgaccuucaccccgcccaacgacuacuggauccugaucaacagcaacaccaacggcgucguguacgaguccacgaacaacagcgacuucuggaccgccguggucgccaucgagccccacgugaaccccguggaccgccaguacaccaucuucggggaguccaagcaguucaacgucagcaacgacuccaacaaguggaaguuccuggagauguuccggagcuccagccagaacgaguucuacaaccgccggacccucacguccgacacccgcuucgugggcauccugaaguacggcgggcggguguggaccuuccacggcgagacgccccgcgccaccaccgacagcuccagcaccgccaaccugaacaacaucuccaucaccauccacagcgaguucuacaucaucccccggagccaggaguccaagugcaacgaguacaucaacaacgggcugugaggacuagucccuguucccagagcccacuuuuuuuucuuuuuuugaaauaaaauagccugucuuucagaucuaaaaaaaaaaaaaaaaaaaaaaaaaaaaaaaaaaaaaaaaaaaaaaaaaaaaaaaaaaaaaaaaaaaaaaaaaaaaaaaaaaaaaaaaaaaaaaaaaaaa

SEQ ID NO: 604 - RNA, 1289 nt, Artificial Sequence
  mRNA product Design a-1 (A100) comprising derived and/or modified sequence from RVA/BE1058/P[4]__AEX30665.1__P2_VP8*(65-223)_Ferritin (opt1)
aggagagucccgcagucggcguccagcggcucugcuuguucgugugugugucguugcaggccuuauucaagcuuaccaugcaguacaucaaggccaacagcaaguucaucggcaucaccgagcugggcagcggguccggccucgacggccccuaccagcccacgaccuucaagccgcccaacgacuacuggcugcugaucuccagcaacaccgacgggguggucuacgaguccaccaacaacagcgacuucuggacggccgugaucgccguggagccccacgucaaccagaccaaccgccaguacgugcuguucggcgagaacaagcaguucaacaucgagaacuccagcgacaaguggaaguucuucgagauguucaagggcaacucccagagcgacuucuccaaccggcgcacccugaccagcuccaaccggcugguggggaugcucaaguacggcgggcgcgucuggacguuccacggcgagaccccgcgggccaccaccgacagcuccagcacggccgaccugaacaacaucuccaucaucauccacagcgaguucuacaucaucccccgcagccaggaguccaagugcaacgaguacaucaacaacgggcugagcggcggggacaucaucaagcuccugaacgagcaggugaacaaggagaugcaguccagcaaccuguacauguccaugagcuccuggugcuacacccacagccucgacggcgccgggcuguuccuguucgaccacgccgcggaggaguacgagcacgccaagaagcucaucaucuuccugaacgagaacaacguccccgugcagcugaccuccaucagcgccccggagcacaaguucgagggccucacgcagaucuuccagaaggccuacgagcacgagcagcacaucuccgagagcaucaacaacaucguggaccacgccaucaaguccaaggaccacgcgaccuucaacuuccugcagugguacgucgccgagcagcacgaggaggaggugcuguucaaggacauccucgacaagaucgagcugaucgggaacgagaaccacggccuguaccucgccgaccaguacgugaaggggaucgccaagagccgcaaguccugaggacuagucccuguucccagagcccacuuuuuuuucuuuuuuugaaauaaaauagccugucuuucagaucuaaaaaaaaaaaaaaaaaaaaaaaaaaaaaaaaaaaaaaaaaaaaaaaaaaaaaaaaaaaaaaaaaaaaaaaaaaaaaaaaaaaaaaaaaaaaaaaaaaaa

SEQ ID NO: 605 - RNA, 1289 nt, Artificial Sequence
  mRNA product Design a-1 (A100) comprising derived and/or modified sequence from RVA/DS-1/P[4]__CAD62680.1__P2_VP8*(65-223)_Ferritin (opt1)
aggagagucccgcagucggcguccagcggcucugcuuguucgugugugugucguugcaggccuuauucaagcuuaccaugcaguacaucaaggccaacagcaaguucaucggcaucaccgagcugggcagcggguccggccucgacgggcccuaccagccgacgaccuucaagccgcccaacgacuacuggcugcugaucuccagcaacaccaacggcguggucuacgaguccaccaacaacaacgacuucuggacggccgugagcuccguggagccccacgucagccagaccaaccgccaguacauccucuucggggagaacaagcaguucaacguggagaacaacuccgacaaguggaaguucuucgagaccuucaccggcagcucccagggcaacuucagcaaccggcgcacgcugaccuccagcaaccggcugguggggaugcucaaguacggcgggcgcgucuggaccuuccacggcgagacgccccgggccaccaccgacuccagcaacaccgccgaccugaacaacaucagcaucaucauccacuccgaguucuacaucaucccccgcagccaggaguccaagugcaacgaguacaucaacaacgggcugagcggcggggacaucaucaagcuccugaacgagcaggugaacaaggagaugcaguccagcaaccuguacauguccaugagcuccuggugcuacacccacagccucgacggcgccgggcuguuccuguucgaccacgccgcggaggaguacgagcacgccaagaagcucaucaucuuccugaacgagaacaacguccccgugcagcugaccuccaucagcgccccggagcacaaguucgagggccucacgcagaucuuccagaaggccuacgagcacgagcagcacaucuccgagagcaucaacaacaucguggaccacgccaucaaguccaaggaccacgcgaccuucaacuuccugcagugguacgucgccgagcagcacgaggaggaggugcuguucaaggacauccucgacaagaucgagcugaucgggaacgagaaccacggccuguaccucgccgaccaguacgugaaggggaucgccaagagccgcaaguccugaggacuagucccuguucccagagcccacuuuuuuuucuuuuuuugaaauaaaauagccugucuuucagaucuaaaaaaaaaaaaaaaaaaaaaaaaaaaaaaaaaaaaaaaaaaaaaaaaaaaaaaaaaaaaaaaaaaaaaaaaaaaaaaaaaaaaaaaaaaaaaaaaaaaa

SEQ ID NO: 606 - RNA, 1289 nt, Artificial Sequence; identical to SEQ ID NO: 605
  mRNA product Design a-1 (A100) comprising derived and/or modified sequence from RVA/DS-1/P[4]__ABV53252.1__P2_VP8*(65-223)_Ferritin (opt1)

SEQ ID NO: 607 - RNA, 1289 nt, Artificial Sequence
  mRNA product Design a-1 (A100) comprising derived and/or modified sequence from RVA/F01322/P[6]__AFA51886.1__P2_VP8*(65-223)_Ferritin (opt1)
aggagagucccgcagucggcguccagcggcucugcuuguucgugugugugucguugcaggccuuauucaagcuuaccaugcaguacaucaaggccaacagcaaguucaucggcaucaccgagcugggcagcggguccggccucgacgggcccuaccagccgaccaacuucaagccgcccaacgacuacuggauccugcugaaccccaccaaccagcagguggugcucgagggcacgaacaagaccgacaucugggucgcccugcugcucguggagccgaacgugaccaaccagagccggcaguacacccuguucggggagacgaagcagaucaccgucgagaacaacaccaacaaguggaaguucuucgagauguuccgcuccagcguguccgccgaguuccagcacaagcggacccugacgagcgacaccaagcucgccggcuucaugaaguucuacaacuccguguggaccuuccacggcgagacccccaacgccacgaccgacuacagcuccaccagcaaccuguucgaggucgagaccgugauccacguggaguucuacaucaucccccgcucccaggagagcaagugcuccgaguacaucaacacggggcugagcggcggggacaucaucaagcuccugaacgagcaggugaacaaggagaugcaguccagcaaccuguacauguccaugagcuccuggugcuacacccacagccucgacggcgccgggcuguuccuguucgaccacgccgcggaggaguacgagcacgccaagaagcucaucaucuuccugaacgagaacaacguccccgugcagcugaccuccaucagcgccccggagcacaaguucgagggccucacgcagaucuuccagaaggccuacgagcacgagcagcacaucuccgagagcaucaacaacaucguggaccacgccaucaaguccaaggaccacgcgaccuucaacuuccugcagugguacgucgccgagcagcacgaggaggaggugcuguucaaggacauccucgacaagaucgagcugaucgggaacgagaaccacggccuguaccucgccgaccaguacgugaaggggaucgccaagagccgcaaguccugaggacuagucccuguucccagagcccacuuuuuuuucuuuuuuugaaauaaaauagccugucuuucagaucuaaaaaaaaaaaaaaaaaaaaaaaaaaaaaaaaaaaaaaaaaaaaaaaaaaaaaaaaaaaaaaaaaaaaaaaaaaaaaaaaaaaaaaaaaaaaaaaaaaaa

SEQ ID NO: 608 - RNA, 1289 nt, Artificial Sequence
  mRNA product Design a-1 (A100) comprising derived and/or modified sequence from RVA/1076/P[6]__AAA47337.1__P2_VP8*(65-223)_Ferritin (opt1)
aggagagucccgcagucggcguccagcggcucugcuuguucgugugugugucguugcaggccuuauucaagcuuaccaugcaguacaucaaggccaacagcaaguucaucggcaucaccgagcugggcagcggguccggccucgacgggcccuaccagccgaccuccuucaagccgcccagcgacuacuggauccugcugaaccccaccaaccagcaggucgugcucgagggcacgaacaagaccgacaucuggguggcccugcugcucguggagcccaacgugaccaaccagucccggcaguacacccuguucggggagacgaagcagaucaccgucgagaacaacaccaacaaguggaaguucuucgagauguuccgcagcuccgugagcgccgaguuccagcacaagcggacccugacguccgacaccaagcucgccggcuuccugaaguucuacaacagcguguggaccuucuacggcgagacgccccacgccaccaccgacuacuccagcaccuccaaccugagcgaggucgagaccgcgauccacguggaguucuacaucaucccccgcucccaggagagcaagugcaacgaguacaucaacacggggcugagcggcggggacaucaucaagcuccugaacgagcaggugaacaaggagaugcaguccagcaaccuguacauguccaugagcuccuggugcuacacccacagccucgacggcgccgggcuguuccuguucgaccacgccgcggaggaguacgagcacgccaagaagcucaucaucuuccugaacgagaacaacguccccgugcagcugaccuccaucagcgccccggagcacaaguucgagggccucacgcagaucuuccagaaggccuacgagcacgagcagcacaucuccgagagcaucaacaacaucguggaccacgccaucaaguccaaggaccacgcgaccuucaacuuccugcagugguacgucgccgagcagcacgaggaggaggugcuguucaaggacauccucgacaagaucgagcugaucgggaacgagaaccacggccuguaccucgccgaccaguacgugaaggggaucgccaagagccgcaaguccugaggacuagucccuguucccagagcccacuuuuuuuucuuuuuuugaaauaaaauagccugucuuucagaucuaaaaaaaaaaaaaaaaaaaaaaaaaaaaaaaaaaaaaaaaaaaaaaaaaaaaaaaaaaaaaaaaaaaaaaaaaaaaaaaaaaaaaaaaaaaaaaaaaaaa

SEQ ID NO: 609 - RNA, 1289 nt, Artificial Sequence
  mRNA product Design a-1 (A100) comprising derived and/or modified sequence from RVA/BE1128/P[8]__AEX30671.1__P2_VP8*(65-223)_Ferritin (opt1) R8582
aggagagucccgcagucggcguccagcggcucugcuuguucgugugugugucguugcaggccuuauucaagcuuaccaugcaguacaucaaggccaacagcaaguucaucggcaucaccgagcugggcagcggguccggccucgacggcccguaccagccgacgaccuucaccccgcccaccgacuacuggauccugaucacguccaacaccaacggggugguguacgagagcaccaacaacuccgacuucuggaccgccgucaucgccguggagccccacgugaacccggucgaccgccaguacaacguguucggcgagaacaagcaguucaacgugcggaacgacagcgacaaguggaaguuccuggagauguuccgcggcuccagccagaacgacuucuacaaccggcgcacgcucaccuccgacacccggcuggucgggauccugaaguacggcgggcgcguguggaccuuccacggcgagacgccccgggccaccaccgacagcuccaacaccgccaaccucgacgggaucagcaucacgauccacuccgaguucuacaucaucccccgcagccaggaguccaagugcaacgaguacaucaacaacggccugagcggcggggacaucaucaagcuccugaacgagcaggugaacaaggagaugcaguccagcaaccuguacauguccaugagcuccuggugcuacacccacagccucgacggcgccgggcuguuccuguucgaccacgccgcggaggaguacgagcacgccaagaagcucaucaucuuccugaacgagaacaacguccccgugcagcugaccuccaucagcgccccggagcacaaguucgagggccucacgcagaucuuccagaaggccuacgagcacgagcagcacaucuccgagagcaucaacaacaucguggaccacgccaucaaguccaaggaccacgcgaccuucaacuuccugcagugguacgucgccgagcagcacgaggaggaggugcuguucaaggacauccucgacaagaucgagcugaucgggaacgagaaccacggccuguaccucgccgaccaguacgugaaggggaucgccaagagccgcaaguccugaggacuagucccuguucccagagcccacuuuuuuuucuuuuuuugaaauaaaauagccugucuuucagaucuaaaaaaaaaaaaaaaaaaaaaaaaaaaaaaaaaaaaaaaaaaaaaaaaaaaaaaaaaaaaaaaaaaaaaaaaaaaaaaaaaaaaaaaaaaaaaaaaaaaa

SEQ ID NO: 610 - RNA, 1289 nt, Artificial Sequence
  mRNA product Design a-1 (A100) comprising derived and/or modified sequence from RVA/Wa-VirWa/P[8]__ACR22783.1__P2_VP8*(65-223)_Ferritin (opt1)
aggagagucccgcagucggcguccagcggcucugcuuguucgugugugugucguugcaggccuuauucaagcuuaccaugcaguacaucaaggccaacagcaaguucaucggcaucaccgagcugggcagcggguccggccucgacgggcccuaccagccgacgaccuucaccccgcccaacgacuacuggauccugaucaacagcaacaccaacggcgucguguacgaguccacgaacaacagcgacuucuggaccgccguggucgccaucgagccccacgugaacccgguggaccgccaguacaccaucuucggggaguccaagcaguucaacguccggaacgacagcaacaaguggaaguuccuggagauguuccgcuccagcucccagaacgaguucuacaaccggcgcacccucacgagcgacacccggcuggugggcauccugaaguacggcgggcgcguguggaccuuccacggcgagaccccgcgggccacgaccgacuccagcuccaccgccaaccucaacaacaucagcaucaccauccacuccgaguucuacaucaucccccgcagccaggagagcaagugcaacgaguacaucaacaacgggcugagcggcggggacaucaucaagcuccugaacgagcaggugaacaaggagaugcaguccagcaaccuguacauguccaugagcuccuggugcuacacccacagccucgacggcgccgggcuguuccuguucgaccacgccgcggaggaguacgagcacgccaagaagcucaucaucuuccugaacgagaacaacguccccgugcagcugaccuccaucagcgccccggagcacaaguucgagggccucacgcagaucuuccagaaggccuacgagcacgagcagcacaucuccgagagcaucaacaacaucguggaccacgccaucaaguccaaggaccacgcgaccuucaacuuccugcagugguacgucgccgagcagcacgaggaggaggugcuguucaaggacauccucgacaagaucgagcugaucgggaacgagaaccacggccuguaccucgccgaccaguacgugaaggggaucgccaagagccgcaaguccugaggacuagucccuguucccagagcccacuuuuuuuucuuuuuuugaaauaaaauagccugucuuucagaucuaaaaaaaaaaaaaaaaaaaaaaaaaaaaaaaaaaaaaaaaaaaaaaaaaaaaaaaaaaaaaaaaaaaaaaaaaaaaaaaaaaaaaaaaaaaaaaaaaaaa

SEQ ID NO: 611 - RNA, 1289 nt, Artificial Sequence
  mRNA product Design a-1 (A100) comprising derived and/or modified sequence from RVA/Wa/P[8]__AAA47290.1__P2_VP8*(65-223)_Ferritin (opt1)
aggagagucccgcagucggcguccagcggcucugcuuguucgugugugugucguugcaggccuuauucaagcuuaccaugcaguacaucaaggccaacagcaaguucaucggcaucaccgagcugggcagcggguccggccucgacgggcccuaccagccgacgaccuucaccccgcccaacgacuacuggauccugaucaacagcaacaccaacggcgucguguacgaguccacgaacaacagcgacuucuggaccgccguggucgccaucgagccccacgugaaccccguggaccgccaguacaccaucuucggggaguccaagcaguucaacgucagcaacgacuccaacaaguggaaguuccuggagauguuccggagcuccagccagaacgaguucuacaaccgccggacccucacguccgacacccgcuucgugggcauccugaaguacggcgggcggguguggaccuuccacggcgagacgccccgcgccaccaccgacagcuccagcaccgccaaccugaacaacaucuccaucaccauccacagcgaguucuacaucaucccccggagccaggaguccaagugcaacgaguacaucaacaacgggcugagcggcggggacaucaucaagcuccugaacgagcaggugaacaaggagaugcaguccagcaaccuguacauguccaugagcuccuggugcuacacccacagccucgacggcgccgggcuguuccuguucgaccacgccgcggaggaguacgagcacgccaagaagcucaucaucuuccugaacgagaacaacguccccgugcagcugaccuccaucagcgccccggagcacaaguucgagggccucacgcagaucuuccagaaggccuacgagcacgagcagcacaucuccgagagcaucaacaacaucguggaccacgccaucaaguccaaggaccacgcgaccuucaacuuccugcagugguacgucgccgagcagcacgaggaggaggugcuguucaaggacauccucgacaagaucgagcugaucgggaacgagaaccacggccuguaccucgccgaccaguacgugaaggggaucgccaagagccgcaaguccugaggacuagucccuguucccagagcccacuuuuuuuucuuuuuuugaaauaaaauagccugucuuucagaucuaaaaaaaaaaaaaaaaaaaaaaaaaaaaaaaaaaaaaaaaaaaaaaaaaaaaaaaaaaaaaaaaaaaaaaaaaaaaaaaaaaaaaaaaaaaaaaaaaaaa

SEQ ID NO: 612 - RNA, 1289 nt, Artificial Sequence; identical to SEQ ID NO: 611
  mRNA product Design a-1 (A100) comprising derived and/or modified sequence from RVA/Wa/P[8]__AAA66953.1__P2_VP8*(65-223)_Ferritin (opt1)

SEQ ID NO: 613 - RNA, 1361 nt, Artificial Sequence
  mRNA product Design a-1 (A100) comprising derived and/or modified sequence from RVA/BE1058/P[4]__AEX30665.1__P2_VP8*(41-223)_Ferritin (opt1)
aggagagucccgcagucggcguccagcggcucugcuuguucgugugugugucguugcaggccuuauucaagcuuaccaugcaguacaucaaggccaacagcaaguucaucggcaucaccgagcugggcagcggguccggcgcccagacccgguacgcgcccgugaacuggggccacggggagaucaacgacagcaccaccgucgagcccgugcucgacggccccuaccagcccacgaccuucaagccgcccaacgacuacuggcugcugaucuccagcaacaccgacgggguggucuacgaguccaccaacaacagcgacuucuggacggccgugaucgccguggagccccacgucaaccagaccaaccgccaguacgugcuguucggcgagaacaagcaguucaacaucgagaacuccagcgacaaguggaaguucuucgagauguucaagggcaacucccagagcgacuucuccaaccggcgcacccugaccagcuccaaccggcugguggggaugcucaaguacggcgggcgcgucuggacguuccacggcgagaccccgcgggccaccaccgacagcuccagcacggccgaccugaacaacaucuccaucaucauccacagcgaguucuacaucaucccccgcagccaggaguccaagugcaacgaguacaucaacaacgggcugagcggcggggacaucaucaagcuccugaacgagcaggugaacaaggagaugcaguccagcaaccuguacauguccaugagcuccuggugcuacacccacagccucgacggcgccgggcuguuccuguucgaccacgccgcggaggaguacgagcacgccaagaagcucaucaucuuccugaacgagaacaacguccccgugcagcugaccuccaucagcgccccggagcacaaguucgagggccucacgcagaucuuccagaaggccuacgagcacgagcagcacaucuccgagagcaucaacaacaucguggaccacgccaucaaguccaaggaccacgcgaccuucaacuuccugcagugguacgucgccgagcagcacgaggaggaggugcuguucaaggacauccucgacaagaucgagcugaucgggaacgagaaccacggccuguaccucgccgaccaguacgugaaggggaucgccaagagccgcaaguccugaggacuagucccuguucccagagcccacuuuuuuuucuuuuuuugaaauaaaauagccugucuuucagaucuaaaaaaaaaaaaaaaaaaaaaaaaaaaaaaaaaaaaaaaaaaaaaaaaaaaaaaaaaaaaaaaaaaaaaaaaaaaaaaaaaaaaaaaaaaaaaaaaaaaa

SEQ ID NO: 614 - RNA, 1361 nt, Artificial Sequence
  mRNA product Design a-1 (A100) comprising derived and/or modified sequence from RVA/DS-1/P[4]__CAD62680.1__P2_VP8*(41-223)_Ferritin (opt1)
aggagagucccgcagucggcguccagcggcucugcuuguucgugugugugucguugcaggccuuauucaagcuuaccaugcaguacaucaaggccaacagcaaguucaucggcaucaccgagcugggcagcggguccggcgcccagacccgguacgcgcccgugaacuggggcuccugggagaucaacgacagcaccaccgucgagcccgugcucgacgggcccuaccagccgacgaccuucaagccgcccaacgacuacuggcugcugaucuccagcaacaccaacggcguggucuacgaguccaccaacaacaacgacuucuggacggccgugagcuccguggagccccacgucagccagaccaaccgccaguacauccucuucggggagaacaagcaguucaacguggagaacaacuccgacaaguggaaguucuucgagaccuucaccggcagcucccagggcaacuucagcaaccggcgcacgcugaccuccagcaaccggcugguggggaugcucaaguacggcgggcgcgucuggaccuuccacggcgagacgccccgggccaccaccgacuccagcaacaccgccgaccugaacaacaucagcaucaucauccacuccgaguucuacaucaucccccgcagccaggaguccaagugcaacgaguacaucaacaacgggcugagcggcggggacaucaucaagcuccugaacgagcaggugaacaaggagaugcaguccagcaaccuguacauguccaugagcuccuggugcuacacccacagccucgacggcgccgggcuguuccuguucgaccacgccgcggaggaguacgagcacgccaagaagcucaucaucuuccugaacgagaacaacguccccgugcagcugaccuccaucagcgccccggagcacaaguucgagggccucacgcagaucuuccagaaggccuacgagcacgagcagcacaucuccgagagcaucaacaacaucguggaccacgccaucaaguccaaggaccacgcgaccuucaacuuccugcagugguacgucgccgagcagcacgaggaggaggugcuguucaaggacauccucgacaagaucgagcugaucgggaacgagaaccacggccuguaccucgccgaccaguacgugaaggggaucgccaagagccgcaaguccugaggacuagucccuguucccagagcccacuuuuuuuucuuuuuuugaaauaaaauagccugucuuucagaucuaaaaaaaaaaaaaaaaaaaaaaaaaaaaaaaaaaaaaaaaaaaaaaaaaaaaaaaaaaaaaaaaaaaaaaaaaaaaaaaaaaaaaaaaaaaaaaaaaaaa

SEQ ID NO: 615 - RNA, 1361 nt, Artificial Sequence; identical to SEQ ID NO: 614
  mRNA product Design a-1 (A100) comprising derived and/or modified sequence from RVA/DS-1/P[4]__ABV53252.1__P2_VP8*(41-223)_Ferritin (opt1)

SEQ ID NO: 616 - RNA, 1361 nt, Artificial Sequence
  mRNA product Design a-1 (A100) comprising derived and/or modified sequence from RVA/F01322/P[6]__AFA51886.1__P2_VP8*(41-223)_Ferritin (opt1)
aggagagucccgcagucggcguccagcggcucugcuuguucgugugugugucguugcaggccuuauucaagcuuaccaugcaguacaucaaggccaacagcaaguucaucggcaucaccgagcugggcagcggguccggcgcccagaccaacuacgcgcccgugaccuggagccacggcgaggugaacgacuccacgaccaucgagcccguccucgacgggcccuaccagccgaccaacuucaagccgcccaacgacuacuggauccugcugaaccccaccaaccagcagguggugcucgagggcacgaacaagaccgacaucugggucgcccugcugcucguggagccgaacgugaccaaccagagccggcaguacacccuguucggggagacgaagcagaucaccgucgagaacaacaccaacaaguggaaguucuucgagauguuccgcuccagcguguccgccgaguuccagcacaagcggacccugacgagcgacaccaagcucgccggcuucaugaaguucuacaacuccguguggaccuuccacggcgagacccccaacgccacgaccgacuacagcuccaccagcaaccuguucgaggucgagaccgugauccacguggaguucuacaucaucccccgcucccaggagagcaagugcuccgaguacaucaacacggggcugagcggcggggacaucaucaagcuccugaacgagcaggugaacaaggagaugcaguccagcaaccuguacauguccaugagcuccuggugcuacacccacagccucgacggcgccgggcuguuccuguucgaccacgccgcggaggaguacgagcacgccaagaagcucaucaucuuccugaacgagaacaacguccccgugcagcugaccuccaucagcgccccggagcacaaguucgagggccucacgcagaucuuccagaaggccuacgagcacgagcagcacaucuccgagagcaucaacaacaucguggaccacgccaucaaguccaaggaccacgcgaccuucaacuuccugcagugguacgucgccgagcagcacgaggaggaggugcuguucaaggacauccucgacaagaucgagcugaucgggaacgagaaccacggccuguaccucgccgaccaguacgugaaggggaucgccaagagccgcaaguccugaggacuagucccuguucccagagcccacuuuuuuuucuuuuuuugaaauaaaauagccugucuuucagaucuaaaaaaaaaaaaaaaaaaaaaaaaaaaaaaaaaaaaaaaaaaaaaaaaaaaaaaaaaaaaaaaaaaaaaaaaaaaaaaaaaaaaaaaaaaaaaaaaaaaa

SEQ ID NO: 617 - RNA, 1361 nt, Artificial Sequence
  mRNA product Design a-1 (A100) comprising derived and/or modified sequence from RVA/1076/P[6]__AAA47337.1__P2_VP8*(41-223)_Ferritin (opt1)
aggagagucccgcagucggcguccagcggcucugcuuguucgugugugugucguugcaggccuuauucaagcuuaccaugcaguacaucaaggccaacagcaaguucaucggcaucaccgagcugggcagcggguccggcgcccagaccaacuacgcgcccgugaccuggagccacggcgaggugaacgacagcacgaccaucgagcccguccucgacgggcccuaccagccgaccuccuucaagccgcccagcgacuacuggauccugcugaaccccaccaaccagcaggucgugcucgagggcacgaacaagaccgacaucuggguggcccugcugcucguggagcccaacgugaccaaccagucccggcaguacacccuguucggggagacgaagcagaucaccgucgagaacaacaccaacaaguggaaguucuucgagauguuccgcagcuccgugagcgccgaguuccagcacaagcggacccugacguccgacaccaagcucgccggcuuccugaaguucuacaacagcguguggaccuucuacggcgagacgccccacgccaccaccgacuacuccagcaccuccaaccugagcgaggucgagaccgcgauccacguggaguucuacaucaucccccgcucccaggagagcaagugcaacgaguacaucaacacggggcugagcggcggggacaucaucaagcuccugaacgagcaggugaacaaggagaugcaguccagcaaccuguacauguccaugagcuccuggugcuacacccacagccucgacggcgccgggcuguuccuguucgaccacgccgcggaggaguacgagcacgccaagaagcucaucaucuuccugaacgagaacaacguccccgugcagcugaccuccaucagcgccccggagcacaaguucgagggccucacgcagaucuuccagaaggccuacgagcacgagcagcacaucuccgagagcaucaacaacaucguggaccacgccaucaaguccaaggaccacgcgaccuucaacuuccugcagugguacgucgccgagcagcacgaggaggaggugcuguucaaggacauccucgacaagaucgagcugaucgggaacgagaaccacggccuguaccucgccgaccaguacgugaaggggaucgccaagagccgcaaguccugaggacuagucccuguucccagagcccacuuuuuuuucuuuuuuugaaauaaaauagccugucuuucagaucuaaaaaaaaaaaaaaaaaaaaaaaaaaaaaaaaaaaaaaaaaaaaaaaaaaaaaaaaaaaaaaaaaaaaaaaaaaaaaaaaaaaaaaaaaaaaaaaaaaaa

SEQ ID NO: 618 - RNA, 1361 nt, Artificial Sequence
  mRNA product Design a-1 (A100) comprising derived and/or modified sequence from RVA/BE1128/P[8]__AEX30671.1__P2_VP8*(41-223)_Ferritin (opt1)
aggagagucccgcagucggcguccagcggcucugcuuguucgugugugugucguugcaggccuuauucaagcuuaccaugcaguacaucaaggccaacagcaaguucaucggcaucaccgagcugggcagcggguccggcgcccagacccgguacgcgcccgugaacuggggccacggggagaucaacgacagcaccaccgucgagcccauccucgacggcccguaccagccgacgaccuucaccccgcccaccgacuacuggauccugaucacguccaacaccaacggggugguguacgagagcaccaacaacuccgacuucuggaccgccgucaucgccguggagccccacgugaacccggucgaccgccaguacaacguguucggcgagaacaagcaguucaacgugcggaacgacagcgacaaguggaaguuccuggagauguuccgcggcuccagccagaacgacuucuacaaccggcgcacgcucaccuccgacacccggcuggucgggauccugaaguacggcgggcgcguguggaccuuccacggcgagacgccccgggccaccaccgacagcuccaacaccgccaaccucgacgggaucagcaucacgauccacuccgaguucuacaucaucccccgcagccaggaguccaagugcaacgaguacaucaacaacggccugagcggcggggacaucaucaagcuccugaacgagcaggugaacaaggagaugcaguccagcaaccuguacauguccaugagcuccuggugcuacacccacagccucgacggcgccgggcuguuccuguucgaccacgccgcggaggaguacgagcacgccaagaagcucaucaucuuccugaacgagaacaacguccccgugcagcugaccuccaucagcgccccggagcacaaguucgagggccucacgcagaucuuccagaaggccuacgagcacgagcagcacaucuccgagagcaucaacaacaucguggaccacgccaucaaguccaaggaccacgcgaccuucaacuuccugcagugguacgucgccgagcagcacgaggaggaggugcuguucaaggacauccucgacaagaucgagcugaucgggaacgagaaccacggccuguaccucgccgaccaguacgugaaggggaucgccaagagccgcaaguccugaggacuagucccuguucccagagcccacuuuuuuuucuuuuuuugaaauaaaauagccugucuuucagaucuaaaaaaaaaaaaaaaaaaaaaaaaaaaaaaaaaaaaaaaaaaaaaaaaaaaaaaaaaaaaaaaaaaaaaaaaaaaaaaaaaaaaaaaaaaaaaaaaaaaa

SEQ ID NO: 619 - RNA, 1361 nt, Artificial Sequence
  mRNA product Design a-1 (A100) comprising derived and/or modified sequence from RVA/Wa-VirWa/P[8]__ACR22783.1__P2_VP8*(41-223)_Ferritin (opt1)
aggagagucccgcagucggcguccagcggcucugcuuguucgugugugugucguugcaggccuuauucaagcuuaccaugcaguacaucaaggccaacagcaaguucaucggcaucaccgagcugggcagcggguccggcgcccagacccgguacgcgcccgugaacugggggcacggcgagaucaacgacuccaccaccguggagcccauccucgacgggcccuaccagccgacgaccuucaccccgcccaacgacuacuggauccugaucaacagcaacaccaacggcgucguguacgaguccacgaacaacagcgacuucuggaccgccguggucgccaucgagccccacgugaacccgguggaccgccaguacaccaucuucggggaguccaagcaguucaacguccggaacgacagcaacaaguggaaguuccuggagauguuccgcuccagcucccagaacgaguucuacaaccggcgcacccucacgagcgacacccggcuggugggcauccugaaguacggcgggcgcguguggaccuuccacggcgagaccccgcgggccacgaccgacuccagcuccaccgccaaccucaacaacaucagcaucaccauccacuccgaguucuacaucaucccccgcagccaggagagcaagugcaacgaguacaucaacaacgggcugagcggcggggacaucaucaagcuccugaacgagcaggugaacaaggagaugcaguccagcaaccuguacauguccaugagcuccuggugcuacacccacagccucgacggcgccgggcuguuccuguucgaccacgccgcggaggaguacgagcacgccaagaagcucaucaucuuccugaacgagaacaacguccccgugcagcugaccuccaucagcgccccggagcacaaguucgagggccucacgcagaucuuccagaaggccuacgagcacgagcagcacaucuccgagagcaucaacaacaucguggaccacgccaucaaguccaaggaccacgcgaccuucaacuuccugcagugguacgucgccgagcagcacgaggaggaggugcuguucaaggacauccucgacaagaucgagcugaucgggaacgagaaccacggccuguaccucgccgaccaguacgugaaggggaucgccaagagccgcaaguccugaggacuagucccuguucccagagcccacuuuuuuuucuuuuuuugaaauaaaauagccugucuuucagaucuaaaaaaaaaaaaaaaaaaaaaaaaaaaaaaaaaaaaaaaaaaaaaaaaaaaaaaaaaaaaaaaaaaaaaaaaaaaaaaaaaaaaaaaaaaaaaaaaaaaa

SEQ ID NO: 620 - RNA, 1361 nt, Artificial Sequence
  mRNA product Design a-1 (A100) comprising derived and/or modified sequence from RVA/Wa/P[8]__AAA47290.1__P2_VP8*(41-223)_Ferritin (opt1)
aggagagucccgcagucggcguccagcggcucugcuuguucgugugugugucguugcaggccuuauucaagcuuaccaugcaguacaucaaggccaacagcaaguucaucggcaucaccgagcugggcagcggguccggcgcccagacccgguacgcgcccgugaacugggggcacggcgagaucaacgacuccaccaccguggagcccauccucgacgggcccuaccagccgacgaccuucaccccgcccaacgacuacuggauccugaucaacagcaacaccaacggcgucguguacgaguccacgaacaacagcgacuucuggaccgccguggucgccaucgagccccacgugaaccccguggaccgccaguacaccaucuucggggaguccaagcaguucaacgucagcaacgacuccaacaaguggaaguuccuggagauguuccggagcuccagccagaacgaguucuacaaccgccggacccucacguccgacacccgcuucgugggcauccugaaguacggcgggcggguguggaccuuccacggcgagacgccccgcgccaccaccgacagcuccagcaccgccaaccugaacaacaucuccaucaccauccacagcgaguucuacaucaucccccggagccaggaguccaagugcaacgaguacaucaacaacgggcugagcggcggggacaucaucaagcuccugaacgagcaggugaacaaggagaugcaguccagcaaccuguacauguccaugagcuccuggugcuacacccacagccucgacggcgccgggcuguuccuguucgaccacgccgcggaggaguacgagcacgccaagaagcucaucaucuuccugaacgagaacaacguccccgugcagcugaccuccaucagcgccccggagcacaaguucgagggccucacgcagaucuuccagaaggccuacgagcacgagcagcacaucuccgagagcaucaacaacaucguggaccacgccaucaaguccaaggaccacgcgaccuucaacuuccugcagugguacgucgccgagcagcacgaggaggaggugcuguucaaggacauccucgacaagaucgagcugaucgggaacgagaaccacggccuguaccucgccgaccaguacgugaaggggaucgccaagagccgcaaguccugaggacuagucccuguucccagagcccacuuuuuuuucuuuuuuugaaauaaaauagccugucuuucagaucuaaaaaaaaaaaaaaaaaaaaaaaaaaaaaaaaaaaaaaaaaaaaaaaaaaaaaaaaaaaaaaaaaaaaaaaaaaaaaaaaaaaaaaaaaaaaaaaaaaaa

SEQ ID NO: 621 - RNA, 1361 nt, Artificial Sequence
  mRNA product Design a-1 (A100) comprising derived and/or modified sequence from RVA/Wa/P[8]__AAA66953.1__P2_VP8*(41-223)_Ferritin (opt1)
aggagagucccgcagucggcguccagcggcucugcuuguucgugugugugucguugcaggccuuauucaagcuuaccaugcaguacaucaaggccaacagcaaguucaucggcaucaccgagcugggcagcggguccggcgcccagacccgguacgcgcccgugaacugggggcacggcgagaucaacgacuccaccaccguggagcccaugcucgacgggcccuaccagccgacgaccuucaccccgcccaacgacuacuggauccugaucaacagcaacaccaacggcgucguguacgaguccacgaacaacagcgacuucuggaccgccguggucgccaucgagccccacgugaaccccguggaccgccaguacaccaucuucggggaguccaagcaguucaacgucagcaacgacuccaacaaguggaaguuccuggagauguuccggagcuccagccagaacgaguucuacaaccgccggacccucacguccgacacccgcuucgugggcauccugaaguacggcgggcggguguggaccuuccacggcgagacgccccgcgccaccaccgacagcuccagcaccgccaaccugaacaacaucuccaucaccauccacagcgaguucuacaucaucccccggagccaggaguccaagugcaacgaguacaucaacaacgggcugagcggcggggacaucaucaagcuccugaacgagcaggugaacaaggagaugcaguccagcaaccuguacauguccaugagcuccuggugcuacacccacagccucgacggcgccgggcuguuccuguucgaccacgccgcggaggaguacgagcacgccaagaagcucaucaucuuccugaacgagaacaacguccccgugcagcugaccuccaucagcgccccggagcacaaguucgagggccucacgcagaucuuccagaaggccuacgagcacgagcagcacaucuccgagagcaucaacaacaucguggaccacgccaucaaguccaaggaccacgcgaccuucaacuuccugcagugguacgucgccgagcagcacgaggaggaggugcuguucaaggacauccucgacaagaucgagcugaucgggaacgagaaccacggccuguaccucgccgaccaguacgugaaggggaucgccaagagccgcaaguccugaggacuagucccuguucccagagcccacuuuuuuuucuuuuuuugaaauaaaauagccugucuuucagaucuaaaaaaaaaaaaaaaaaaaaaaaaaaaaaaaaaaaaaaaaaaaaaaaaaaaaaaaaaaaaaaaaaaaaaaaaaaaaaaaaaaaaaaaaaaaaaaaaaaaa

SEQ ID NO: 622 - RNA, 1295 nt, Artificial Sequence
  mRNA product Design a-1 (A100) comprising derived and/or modified sequence from RVA/BE1058/P[4]__AEX30665.1__LumSynt_P2_VP8*(65-223) (opt1)
aggagagucccgcagucggcguccagcggcucugcuuguucgugugugugucguugcaggccuuauucaagcuuaccaugcagaucuacgagggcaagcugaccgccgaggggcuccgcuucggcaucguggccagccgguucaaccacgcgcuggucgaccgccugguggagggggccaucgacgccaucgugcggcacggcgggcgcgaggaggacaucacccucguccgggugcccggcuccugggagaucccgguggccgccggcgagcuggcccgcaaggaggacaucgacgcggucaucgccaucggggugcugauccggggcgccacgccccacuucgacuacaucgccagcgagguguccaaggggcucgcggaccugagccuggagcuccgcaagcccaucaccuucggcgucaucaccgccgacacccuggagcaggccaucgagcgggccgggacgaagcacggcaacaagggcugggaggccgcgcuguccgccaucgagauggccaaccucuucaagagccugcgcggcgggagcggcggguccggcgggagcggcggcuccgggggcgggcaguacaucaaggccaacagcaaguucaucggcaucaccgagcugggcagcggguccggccucgacggccccuaccagcccacgaccuucaagccgcccaacgacuacuggcugcugaucuccagcaacaccgacgggguggucuacgaguccaccaacaacagcgacuucuggacggccgugaucgccguggagccccacgucaaccagaccaaccgccaguacgugcuguucggcgagaacaagcaguucaacaucgagaacuccagcgacaaguggaaguucuucgagauguucaagggcaacucccagagcgacuucuccaaccggcgcacccugaccagcuccaaccggcugguggggaugcucaaguacggcgggcgcgucuggacguuccacggcgagaccccgcgggccaccaccgacagcuccagcacggccgaccugaacaacaucuccaucaucauccacagcgaguucuacaucaucccccgcagccaggaguccaagugcaacgaguacaucaacaacgggcugugaggacuagucccuguucccagagcccacuuuuuuuucuuuuuuugaaauaaaauagccugucuuucagaucuaaaaaaaaaaaaaaaaaaaaaaaaaaaaaaaaaaaaaaaaaaaaaaaaaaaaaaaaaaaaaaaaaaaaaaaaaaaaaaaaaaaaaaaaaaaaaaaaaaaa

SEQ ID NO: 623 - RNA, 1295 nt, Artificial Sequence
  mRNA product Design a-1 (A100) comprising derived and/or modified sequence from RVA/DS-1/P[4]__CAD62680.1__LumSynt_P2_VP8*(65-223) (opt1)
aggagagucccgcagucggcguccagcggcucugcuuguucgugugugugucguugcaggccuuauucaagcuuaccaugcagaucuacgagggcaagcugaccgccgaggggcuccgcuucggcaucguggccagccgguucaaccacgcgcuggucgaccgccugguggagggggccaucgacgccaucgugcggcacggcgggcgcgaggaggacaucacccucguccgggugcccggcuccugggagaucccgguggccgccggcgagcuggcccgcaaggaggacaucgacgcggucaucgccaucggggugcugauccggggcgccacgccccacuucgacuacaucgccagcgagguguccaaggggcucgcggaccugagccuggagcuccgcaagcccaucaccuucggcgucaucaccgccgacacccuggagcaggccaucgagcgggccgggacgaagcacggcaacaagggcugggaggccgcgcuguccgccaucgagauggccaaccucuucaagagccugcgcggcgggagcggcggguccggcgggagcggcggcuccgggggcgggcaguacaucaaggccaacagcaaguucaucggcaucaccgagcugggcagcggguccggccucgacgggcccuaccagccgacgaccuucaagccgcccaacgacuacuggcugcugaucuccagcaacaccaacggcguggucuacgaguccaccaacaacaacgacuucuggacggccgugagcuccguggagccccacgucagccagaccaaccgccaguacauccucuucggggagaacaagcaguucaacguggagaacaacuccgacaaguggaaguucuucgagaccuucaccggcagcucccagggcaacuucagcaaccggcgcacgcugaccuccagcaaccggcugguggggaugcucaaguacggcgggcgcgucuggaccuuccacggcgagacgccccgggccaccaccgacuccagcaacaccgccgaccugaacaacaucagcaucaucauccacuccgaguucuacaucaucccccgcagccaggaguccaagugcaacgaguacaucaacaacgggcugugaggacuagucccuguucccagagcccacuuuuuuuucuuuuuuugaaauaaaauagccugucuuucagaucuaaaaaaaaaaaaaaaaaaaaaaaaaaaaaaaaaaaaaaaaaaaaaaaaaaaaaaaaaaaaaaaaaaaaaaaaaaaaaaaaaaaaaaaaaaaaaaaaaaaa

SEQ ID NO: 624 - RNA, 1295 nt, Artificial Sequence; identical to SEQ ID NO: 623
  mRNA product Design a-1 (A100) comprising derived and/or modified sequence from RVA/DS-1/P[4]__ABV53252.1__LumSynt_P2_VP8*(65-223) (opt1)

SEQ ID NO: 625 - RNA, 1295 nt, Artificial Sequence
  mRNA product Design a-1 (A100) comprising derived and/or modified sequence from RVA/F01322/P[6]__AFA51886.1__LumSynt_P2_VP8*(65-223) (opt1)
aggagagucccgcagucggcguccagcggcucugcuuguucgugugugugucguugcaggccuuauucaagcuuaccaugcagaucuacgagggcaagcugaccgccgaggggcuccgcuucggcaucguggccagccgguucaaccacgcgcuggucgaccgccugguggagggggccaucgacgccaucgugcggcacggcgggcgcgaggaggacaucacccucguccgggugcccggcuccugggagaucccgguggccgccggcgagcuggcccgcaaggaggacaucgacgcggucaucgccaucggggugcugauccggggcgccacgccccacuucgacuacaucgccagcgagguguccaaggggcucgcggaccugagccuggagcuccgcaagcccaucaccuucggcgucaucaccgccgacacccuggagcaggccaucgagcgggccgggacgaagcacggcaacaagggcugggaggccgcgcuguccgccaucgagauggccaaccucuucaagagccugcgcggcgggagcggcggguccggcgggagcggcggcuccgggggcgggcaguacaucaaggccaacagcaaguucaucggcaucaccgagcugggcagcggguccggccucgacgggcccuaccagccgaccaacuucaagccgcccaacgacuacuggauccugcugaaccccaccaaccagcagguggugcucgagggcacgaacaagaccgacaucugggucgcccugcugcucguggagccgaacgugaccaaccagagccggcaguacacccuguucggggagacgaagcagaucaccgucgagaacaacaccaacaaguggaaguucuucgagauguuccgcuccagcguguccgccgaguuccagcacaagcggacccugacgagcgacaccaagcucgccggcuucaugaaguucuacaacuccguguggaccuuccacggcgagacccccaacgccacgaccgacuacagcuccaccagcaaccuguucgaggucgagaccgugauccacguggaguucuacaucaucccccgcucccaggagagcaagugcuccgaguacaucaacacggggcugugaggacuagucccuguucccagagcccacuuuuuuuucuuuuuuugaaauaaaauagccugucuuucagaucuaaaaaaaaaaaaaaaaaaaaaaaaaaaaaaaaaaaaaaaaaaaaaaaaaaaaaaaaaaaaaaaaaaaaaaaaaaaaaaaaaaaaaaaaaaaaaaaaaaaa

SEQ ID NO: 626 - RNA, 1295 nt, Artificial Sequence
  mRNA product Design a-1 (A100) comprising derived and/or modified sequence from RVA/1076/P[6]__AAA47337.1__LumSynt_P2_VP8*(65-223) (opt1)
aggagagucccgcagucggcguccagcggcucugcuuguucgugugugugucguugcaggccuuauucaagcuuaccaugcagaucuacgagggcaagcugaccgccgaggggcuccgcuucggcaucguggccagccgguucaaccacgcgcuggucgaccgccugguggagggggccaucgacgccaucgugcggcacggcgggcgcgaggaggacaucacccucguccgggugcccggcuccugggagaucccgguggccgccggcgagcuggcccgcaaggaggacaucgacgcggucaucgccaucggggugcugauccggggcgccacgccccacuucgacuacaucgccagcgagguguccaaggggcucgcggaccugagccuggagcuccgcaagcccaucaccuucggcgucaucaccgccgacacccuggagcaggccaucgagcgggccgggacgaagcacggcaacaagggcugggaggccgcgcuguccgccaucgagauggccaaccucuucaagagccugcgcggcgggagcggcggguccggcgggagcggcggcuccgggggcgggcaguacaucaaggccaacagcaaguucaucggcaucaccgagcugggcagcggguccggccucgacgggcccuaccagccgaccuccuucaagccgcccagcgacuacuggauccugcugaaccccaccaaccagcaggucgugcucgagggcacgaacaagaccgacaucuggguggcccugcugcucguggagcccaacgugaccaaccagucccggcaguacacccuguucggggagacgaagcagaucaccgucgagaacaacaccaacaaguggaaguucuucgagauguuccgcagcuccgugagcgccgaguuccagcacaagcggacccugacguccgacaccaagcucgccggcuuccugaaguucuacaacagcguguggaccuucuacggcgagacgccccacgccaccaccgacuacuccagcaccuccaaccugagcgaggucgagaccgcgauccacguggaguucuacaucaucccccgcucccaggagagcaagugcaacgaguacaucaacacggggcugugaggacuagucccuguucccagagcccacuuuuuuuucuuuuuuugaaauaaaauagccugucuuucagaucuaaaaaaaaaaaaaaaaaaaaaaaaaaaaaaaaaaaaaaaaaaaaaaaaaaaaaaaaaaaaaaaaaaaaaaaaaaaaaaaaaaaaaaaaaaaaaaaaaaaa

SEQ ID NO: 627 - RNA, 1295 nt, Artificial Sequence
  mRNA product Design a-1 (A100) comprising derived and/or modified sequence from RVA/BE1128/P[8]__AEX30671.1__LumSynt_P2_VP8*(65-223) (opt1)
aggagagucccgcagucggcguccagcggcucugcuuguucgugugugugucguugcaggccuuauucaagcuuaccaugcagaucuacgagggcaagcugaccgccgaggggcuccgcuucggcaucguggccagccgguucaaccacgcgcuggucgaccgccugguggagggggccaucgacgccaucgugcggcacggcgggcgcgaggaggacaucacccucguccgggugcccggcuccugggagaucccgguggccgccggcgagcuggcccgcaaggaggacaucgacgcggucaucgccaucggggugcugauccggggcgccacgccccacuucgacuacaucgccagcgagguguccaaggggcucgcggaccugagccuggagcuccgcaagcccaucaccuucggcgucaucaccgccgacacccuggagcaggccaucgagcgggccgggacgaagcacggcaacaagggcugggaggccgcgcuguccgccaucgagauggccaaccucuucaagagccugcgcggcgggagcggcggguccggcgggagcggcggcuccgggggcgggcaguacaucaaggccaacagcaaguucaucggcaucaccgagcugggcagcggguccggccucgacggcccguaccagccgacgaccuucaccccgcccaccgacuacuggauccugaucacguccaacaccaacggggugguguacgagagcaccaacaacuccgacuucuggaccgccgucaucgccguggagccccacgugaacccggucgaccgccaguacaacguguucggcgagaacaagcaguucaacgugcggaacgacagcgacaaguggaaguuccuggagauguuccgcggcuccagccagaacgacuucuacaaccggcgcacgcucaccuccgacacccggcuggucgggauccugaaguacggcgggcgcguguggaccuuccacggcgagacgccccgggccaccaccgacagcuccaacaccgccaaccucgacgggaucagcaucacgauccacuccgaguucuacaucaucccccgcagccaggaguccaagugcaacgaguacaucaacaacggccugugaggacuagucccuguucccagagcccacuuuuuuuucuuuuuuugaaauaaaauagccugucuuucagaucuaaaaaaaaaaaaaaaaaaaaaaaaaaaaaaaaaaaaaaaaaaaaaaaaaaaaaaaaaaaaaaaaaaaaaaaaaaaaaaaaaaaaaaaaaaaaaaaaaaaa

SEQ ID NO: 628 - RNA, 1295 nt, Artificial Sequence
  mRNA product Design a-1 (A100) comprising derived and/or modified sequence from RVA/Wa-VirWa/P[8]__ACR22783.1__LumSynt_P2_VP8*(65-223) (opt1)
aggagagucccgcagucggcguccagcggcucugcuuguucgugugugugucguugcaggccuuauucaagcuuaccaugcagaucuacgagggcaagcugaccgccgaggggcuccgcuucggcaucguggccagccgguucaaccacgcgcuggucgaccgccugguggagggggccaucgacgccaucgugcggcacggcgggcgcgaggaggacaucacccucguccgggugcccggcuccugggagaucccgguggccgccggcgagcuggcccgcaaggaggacaucgacgcggucaucgccaucggggugcugauccggggcgccacgccccacuucgacuacaucgccagcgagguguccaaggggcucgcggaccugagccuggagcuccgcaagcccaucaccuucggcgucaucaccgccgacacccuggagcaggccaucgagcgggccgggacgaagcacggcaacaagggcugggaggccgcgcuguccgccaucgagauggccaaccucuucaagagccugcgcggcgggagcggcggguccggcgggagcggcggcuccgggggcgggcaguacaucaaggccaacagcaaguucaucggcaucaccgagcugggcagcggguccggccucgacgggcccuaccagccgacgaccuucaccccgcccaacgacuacuggauccugaucaacagcaacaccaacggcgucguguacgaguccacgaacaacagcgacuucuggaccgccguggucgccaucgagccccacgugaacccgguggaccgccaguacaccaucuucggggaguccaagcaguucaacguccggaacgacagcaacaaguggaaguuccuggagauguuccgcuccagcucccagaacgaguucuacaaccggcgcacccucacgagcgacacccggcuggugggcauccugaaguacggcgggcgcguguggaccuuccacggcgagaccccgcgggccacgaccgacuccagcuccaccgccaaccucaacaacaucagcaucaccauccacuccgaguucuacaucaucccccgcagccaggagagcaagugcaacgaguacaucaacaacgggcugugaggacuagucccuguucccagagcccacuuuuuuuucuuuuuuugaaauaaaauagccugucuuucagaucuaaaaaaaaaaaaaaaaaaaaaaaaaaaaaaaaaaaaaaaaaaaaaaaaaaaaaaaaaaaaaaaaaaaaaaaaaaaaaaaaaaaaaaaaaaaaaaaaaaaa

SEQ ID NO: 629 - RNA, 1295 nt, Artificial Sequence
  mRNA product Design a-1 (A100) comprising derived and/or modified sequence from RVA/Wa/P[8]__AAA47290.1__LumSynt_P2_VP8*(65-223) (opt1)
aggagagucccgcagucggcguccagcggcucugcuuguucgugugugugucguugcaggccuuauucaagcuuaccaugcagaucuacgagggcaagcugaccgccgaggggcuccgcuucggcaucguggccagccgguucaaccacgcgcuggucgaccgccugguggagggggccaucgacgccaucgugcggcacggcgggcgcgaggaggacaucacccucguccgggugcccggcuccugggagaucccgguggccgccggcgagcuggcccgcaaggaggacaucgacgcggucaucgccaucggggugcugauccggggcgccacgccccacuucgacuacaucgccagcgagguguccaaggggcucgcggaccugagccuggagcuccgcaagcccaucaccuucggcgucaucaccgccgacacccuggagcaggccaucgagcgggccgggacgaagcacggcaacaagggcugggaggccgcgcuguccgccaucgagauggccaaccucuucaagagccugcgcggcgggagcggcggguccggcgggagcggcggcuccgggggcgggcaguacaucaaggccaacagcaaguucaucggcaucaccgagcugggcagcggguccggccucgacgggcccuaccagccgacgaccuucaccccgcccaacgacuacuggauccugaucaacagcaacaccaacggcgucguguacgaguccacgaacaacagcgacuucuggaccgccguggucgccaucgagccccacgugaaccccguggaccgccaguacaccaucuucggggaguccaagcaguucaacgucagcaacgacuccaacaaguggaaguuccuggagauguuccggagcuccagccagaacgaguucuacaaccgccggacccucacguccgacacccgcuucgugggcauccugaaguacggcgggcggguguggaccuuccacggcgagacgccccgcgccaccaccgacagcuccagcaccgccaaccugaacaacaucuccaucaccauccacagcgaguucuacaucaucccccggagccaggaguccaagugcaacgaguacaucaacaacgggcugugaggacuagucccuguucccagagcccacuuuuuuuucuuuuuuugaaauaaaauagccugucuuucagaucuaaaaaaaaaaaaaaaaaaaaaaaaaaaaaaaaaaaaaaaaaaaaaaaaaaaaaaaaaaaaaaaaaaaaaaaaaaaaaaaaaaaaaaaaaaaaaaaaaaaa

SEQ ID NO: 630 - RNA, 1295 nt, Artificial Sequence; identical to SEQ ID NO: 629
  mRNA product Design a-1 (A100) comprising derived and/or modified sequence from RVA/Wa/P[8]__AAA66953.1__LumSynt_P2_VP8*(65-223) (opt1)

SEQ ID NO: 631 - RNA, 1367 nt, Artificial Sequence
  mRNA product Design a-1 (A100) comprising derived and/or modified sequence from RVA/BE1058/P[4]__AEX30665.1__LumSynt_P2_VP8*(41-223) (opt1)
aggagagucccgcagucggcguccagcggcucugcuuguucgugugugugucguugcaggccuuauucaagcuuaccaugcagaucuacgagggcaagcugaccgccgaggggcuccgcuucggcaucguggccagccgguucaaccacgcgcuggucgaccgccugguggagggggccaucgacgccaucgugcggcacggcgggcgcgaggaggacaucacccucguccgggugcccggcuccugggagaucccgguggccgccggcgagcuggcccgcaaggaggacaucgacgcggucaucgccaucggggugcugauccggggcgccacgccccacuucgacuacaucgccagcgagguguccaaggggcucgcggaccugagccuggagcuccgcaagcccaucaccuucggcgucaucaccgccgacacccuggagcaggccaucgagcgggccgggacgaagcacggcaacaagggcugggaggccgcgcuguccgccaucgagauggccaaccucuucaagagccugcgcggcgggagcggcggguccggcgggagcggcggcuccgggggcgggcaguacaucaaggccaacagcaaguucaucggcaucaccgagcugggcagcggguccggcgcccagacccgguacgcgcccgugaacuggggccacggggagaucaacgacagcaccaccgucgagcccgugcucgacggccccuaccagcccacgaccuucaagccgcccaacgacuacuggcugcugaucuccagcaacaccgacgggguggucuacgaguccaccaacaacagcgacuucuggacggccgugaucgccguggagccccacgucaaccagaccaaccgccaguacgugcuguucggcgagaacaagcaguucaacaucgagaacuccagcgacaaguggaaguucuucgagauguucaagggcaacucccagagcgacuucuccaaccggcgcacccugaccagcuccaaccggcugguggggaugcucaaguacggcgggcgcgucuggacguuccacggcgagaccccgcgggccaccaccgacagcuccagcacggccgaccugaacaacaucuccaucaucauccacagcgaguucuacaucaucccccgcagccaggaguccaagugcaacgaguacaucaacaacgggcugugaggacuagucccuguucccagagcccacuuuuuuuucuuuuuuugaaauaaaauagccugucuuucagaucuaaaaaaaaaaaaaaaaaaaaaaaaaaaaaaaaaaaaaaaaaaaaaaaaaaaaaaaaaaaaaaaaaaaaaaaaaaaaaaaaaaaaaaaaaaaaaaaaaaaa

SEQ ID NO: 632 - RNA, 1367 nt, Artificial Sequence
  mRNA product Design a-1 (A100) comprising derived and/or modified sequence from RVA/DS-1/P[4]__CAD62680.1__LumSynt_P2_VP8*(41-223) (opt1)
aggagagucccgcagucggcguccagcggcucugcuuguucgugugugugucguugcaggccuuauucaagcuuaccaugcagaucuacgagggcaagcugaccgccgaggggcuccgcuucggcaucguggccagccgguucaaccacgcgcuggucgaccgccugguggagggggccaucgacgccaucgugcggcacggcgggcgcgaggaggacaucacccucguccgggugcccggcuccugggagaucccgguggccgccggcgagcuggcccgcaaggaggacaucgacgcggucaucgccaucggggugcugauccggggcgccacgccccacuucgacuacaucgccagcgagguguccaaggggcucgcggaccugagccuggagcuccgcaagcccaucaccuucggcgucaucaccgccgacacccuggagcaggccaucgagcgggccgggacgaagcacggcaacaagggcugggaggccgcgcuguccgccaucgagauggccaaccucuucaagagccugcgcggcgggagcggcggguccggcgggagcggcggcuccgggggcgggcaguacaucaaggccaacagcaaguucaucggcaucaccgagcugggcagcggguccggcgcccagacccgguacgcgcccgugaacuggggcuccugggagaucaacgacagcaccaccgucgagcccgugcucgacgggcccuaccagccgacgaccuucaagccgcccaacgacuacuggcugcugaucuccagcaacaccaacggcguggucuacgaguccaccaacaacaacgacuucuggacggccgugagcuccguggagccccacgucagccagaccaaccgccaguacauccucuucggggagaacaagcaguucaacguggagaacaacuccgacaaguggaaguucuucgagaccuucaccggcagcucccagggcaacuucagcaaccggcgcacgcugaccuccagcaaccggcugguggggaugcucaaguacggcgggcgcgucuggaccuuccacggcgagacgccccgggccaccaccgacuccagcaacaccgccgaccugaacaacaucagcaucaucauccacuccgaguucuacaucaucccccgcagccaggaguccaagugcaacgaguacaucaacaacgggcugugaggacuagucccuguucccagagcccacuuuuuuuucuuuuuuugaaauaaaauagccugucuuucagaucuaaaaaaaaaaaaaaaaaaaaaaaaaaaaaaaaaaaaaaaaaaaaaaaaaaaaaaaaaaaaaaaaaaaaaaaaaaaaaaaaaaaaaaaaaaaaaaaaaaaa

SEQ ID NO: 633 - RNA, 1367 nt, Artificial Sequence; identical to SEQ ID NO: 632
  mRNA product Design a-1 (A100) comprising derived and/or modified sequence from RVA/DS-1/P[4]__ABV53252.1__LumSynt_P2_VP8*(41-223) (opt1)

SEQ ID NO: 634 - RNA, 1367 nt, Artificial Sequence
  mRNA product Design a-1 (A100) comprising derived and/or modified sequence from RVA/F01322/P[6]__AFA51886.1__LumSynt_P2_VP8*(41-223) (opt1)
aggagagucccgcagucggcguccagcggcucugcuuguucgugugugugucguugcaggccuuauucaagcuuaccaugcagaucuacgagggcaagcugaccgccgaggggcuccgcuucggcaucguggccagccgguucaaccacgcgcuggucgaccgccugguggagggggccaucgacgccaucgugcggcacggcgggcgcgaggaggacaucacccucguccgggugcccggcuccugggagaucccgguggccgccggcgagcuggcccgcaaggaggacaucgacgcggucaucgccaucggggugcugauccggggcgccacgccccacuucgacuacaucgccagcgagguguccaaggggcucgcggaccugagccuggagcuccgcaagcccaucaccuucggcgucaucaccgccgacacccuggagcaggccaucgagcgggccgggacgaagcacggcaacaagggcugggaggccgcgcuguccgccaucgagauggccaaccucuucaagagccugcgcggcgggagcggcggguccggcgggagcggcggcuccgggggcgggcaguacaucaaggccaacagcaaguucaucggcaucaccgagcugggcagcggguccggcgcccagaccaacuacgcgcccgugaccuggagccacggcgaggugaacgacuccacgaccaucgagcccguccucgacgggcccuaccagccgaccaacuucaagccgcccaacgacuacuggauccugcugaaccccaccaaccagcagguggugcucgagggcacgaacaagaccgacaucugggucgcccugcugcucguggagccgaacgugaccaaccagagccggcaguacacccuguucggggagacgaagcagaucaccgucgagaacaacaccaacaaguggaaguucuucgagauguuccgcuccagcguguccgccgaguuccagcacaagcggacccugacgagcgacaccaagcucgccggcuucaugaaguucuacaacuccguguggaccuuccacggcgagacccccaacgccacgaccgacuacagcuccaccagcaaccuguucgaggucgagaccgugauccacguggaguucuacaucaucccccgcucccaggagagcaagugcuccgaguacaucaacacggggcugugaggacuagucccuguucccagagcccacuuuuuuuucuuuuuuugaaauaaaauagccugucuuucagaucuaaaaaaaaaaaaaaaaaaaaaaaaaaaaaaaaaaaaaaaaaaaaaaaaaaaaaaaaaaaaaaaaaaaaaaaaaaaaaaaaaaaaaaaaaaaaaaaaaaaa

SEQ ID NO: 635 - RNA, 1367 nt, Artificial Sequence
  mRNA product Design a-1 (A100) comprising derived and/or modified sequence from RVA/1076/P[6]__AAA47337.1__LumSynt_P2_VP8*(41-223) (opt1)
aggagagucccgcagucggcguccagcggcucugcuuguucgugugugugucguugcaggccuuauucaagcuuaccaugcagaucuacgagggcaagcugaccgccgaggggcuccgcuucggcaucguggccagccgguucaaccacgcgcuggucgaccgccugguggagggggccaucgacgccaucgugcggcacggcgggcgcgaggaggacaucacccucguccgggugcccggcuccugggagaucccgguggccgccggcgagcuggcccgcaaggaggacaucgacgcggucaucgccaucggggugcugauccggggcgccacgccccacuucgacuacaucgccagcgagguguccaaggggcucgcggaccugagccuggagcuccgcaagcccaucaccuucggcgucaucaccgccgacacccuggagcaggccaucgagcgggccgggacgaagcacggcaacaagggcugggaggccgcgcuguccgccaucgagauggccaaccucuucaagagccugcgcggcgggagcggcggguccggcgggagcggcggcuccgggggcgggcaguacaucaaggccaacagcaaguucaucggcaucaccgagcugggcagcggguccggcgcccagaccaacuacgcgcccgugaccuggagccacggcgaggugaacgacagcacgaccaucgagcccguccucgacgggcccuaccagccgaccuccuucaagccgcccagcgacuacuggauccugcugaaccccaccaaccagcaggucgugcucgagggcacgaacaagaccgacaucuggguggcccugcugcucguggagcccaacgugaccaaccagucccggcaguacacccuguucggggagacgaagcagaucaccgucgagaacaacaccaacaaguggaaguucuucgagauguuccgcagcuccgugagcgccgaguuccagcacaagcggacccugacguccgacaccaagcucgccggcuuccugaaguucuacaacagcguguggaccuucuacggcgagacgccccacgccaccaccgacuacuccagcaccuccaaccugagcgaggucgagaccgcgauccacguggaguucuacaucaucccccgcucccaggagagcaagugcaacgaguacaucaacacggggcugugaggacuagucccuguucccagagcccacuuuuuuuucuuuuuuugaaauaaaauagccugucuuucagaucuaaaaaaaaaaaaaaaaaaaaaaaaaaaaaaaaaaaaaaaaaaaaaaaaaaaaaaaaaaaaaaaaaaaaaaaaaaaaaaaaaaaaaaaaaaaaaaaaaaaa

SEQ ID NO: 636 - RNA, 1367 nt, Artificial Sequence
  mRNA product Design a-1 (A100) comprising derived and/or modified sequence from RVA/BE1128/P[8]__AEX30671.1__LumSynt_P2_VP8*(41-223) (opt1) R8583
aggagagucccgcagucggcguccagcggcucugcuuguucgugugugugucguugcaggccuuauucaagcuuaccaugcagaucuacgagggcaagcugaccgccgaggggcuccgcuucggcaucguggccagccgguucaaccacgcgcuggucgaccgccugguggagggggccaucgacgccaucgugcggcacggcgggcgcgaggaggacaucacccucguccgggugcccggcuccugggagaucccgguggccgccggcgagcuggcccgcaaggaggacaucgacgcggucaucgccaucggggugcugauccggggcgccacgccccacuucgacuacaucgccagcgagguguccaaggggcucgcggaccugagccuggagcuccgcaagcccaucaccuucggcgucaucaccgccgacacccuggagcaggccaucgagcgggccgggacgaagcacggcaacaagggcugggaggccgcgcuguccgccaucgagauggccaaccucuucaagagccugcgcggcgggagcggcggguccggcgggagcggcggcuccgggggcgggcaguacaucaaggccaacagcaaguucaucggcaucaccgagcugggcagcggguccggcgcccagacccgguacgcgcccgugaacuggggccacggggagaucaacgacagcaccaccgucgagcccauccucgacggcccguaccagccgacgaccuucaccccgcccaccgacuacuggauccugaucacguccaacaccaacggggugguguacgagagcaccaacaacuccgacuucuggaccgccgucaucgccguggagccccacgugaacccggucgaccgccaguacaacguguucggcgagaacaagcaguucaacgugcggaacgacagcgacaaguggaaguuccuggagauguuccgcggcuccagccagaacgacuucuacaaccggcgcacgcucaccuccgacacccggcuggucgggauccugaaguacggcgggcgcguguggaccuuccacggcgagacgccccgggccaccaccgacagcuccaacaccgccaaccucgacgggaucagcaucacgauccacuccgaguucuacaucaucccccgcagccaggaguccaagugcaacgaguacaucaacaacggccugugaggacuagucccuguucccagagcccacuuuuuuuucuuuuuuugaaauaaaauagccugucuuucagaucuaaaaaaaaaaaaaaaaaaaaaaaaaaaaaaaaaaaaaaaaaaaaaaaaaaaaaaaaaaaaaaaaaaaaaaaaaaaaaaaaaaaaaaaaaaaaaaaaaaaa

SEQ ID NO: 637 - RNA, 1367 nt, Artificial Sequence
  mRNA product Design a-1 (A100) comprising derived and/or modified sequence from RVA/Wa-VirWa/P[8]__ACR22783.1__LumSynt_P2_VP8*(41-223) (opt1)
aggagagucccgcagucggcguccagcggcucugcuuguucgugugugugucguugcaggccuuauucaagcuuaccaugcagaucuacgagggcaagcugaccgccgaggggcuccgcuucggcaucguggccagccgguucaaccacgcgcuggucgaccgccugguggagggggccaucgacgccaucgugcggcacggcgggcgcgaggaggacaucacccucguccgggugcccggcuccugggagaucccgguggccgccggcgagcuggcccgcaaggaggacaucgacgcggucaucgccaucggggugcugauccggggcgccacgccccacuucgacuacaucgccagcgagguguccaaggggcucgcggaccugagccuggagcuccgcaagcccaucaccuucggcgucaucaccgccgacacccuggagcaggccaucgagcgggccgggacgaagcacggcaacaagggcugggaggccgcgcuguccgccaucgagauggccaaccucuucaagagccugcgcggcgggagcggcggguccggcgggagcggcggcuccgggggcgggcaguacaucaaggccaacagcaaguucaucggcaucaccgagcugggcagcggguccggcgcccagacccgguacgcgcccgugaacugggggcacggcgagaucaacgacuccaccaccguggagcccauccucgacgggcccuaccagccgacgaccuucaccccgcccaacgacuacuggauccugaucaacagcaacaccaacggcgucguguacgaguccacgaacaacagcgacuucuggaccgccguggucgccaucgagccccacgugaacccgguggaccgccaguacaccaucuucggggaguccaagcaguucaacguccggaacgacagcaacaaguggaaguuccuggagauguuccgcuccagcucccagaacgaguucuacaaccggcgcacccucacgagcgacacccggcuggugggcauccugaaguacggcgggcgcguguggaccuuccacggcgagaccccgcgggccacgaccgacuccagcuccaccgccaaccucaacaacaucagcaucaccauccacuccgaguucuacaucaucccccgcagccaggagagcaagugcaacgaguacaucaacaacgggcugugaggacuagucccuguucccagagcccacuuuuuuuucuuuuuuugaaauaaaauagccugucuuucagaucuaaaaaaaaaaaaaaaaaaaaaaaaaaaaaaaaaaaaaaaaaaaaaaaaaaaaaaaaaaaaaaaaaaaaaaaaaaaaaaaaaaaaaaaaaaaaaaaaaaaa

SEQ ID NO: 638 - RNA, 1367 nt, Artificial Sequence
  mRNA product Design a-1 (A100) comprising derived and/or modified sequence from RVA/Wa/P[8]__AAA47290.1__LumSynt_P2_VP8*(41-223) (opt1)
aggagagucccgcagucggcguccagcggcucugcuuguucgugugugugucguugcaggccuuauucaagcuuaccaugcagaucuacgagggcaagcugaccgccgaggggcuccgcuucggcaucguggccagccgguucaaccacgcgcuggucgaccgccugguggagggggccaucgacgccaucgugcggcacggcgggcgcgaggaggacaucacccucguccgggugcccggcuccugggagaucccgguggccgccggcgagcuggcccgcaaggaggacaucgacgcggucaucgccaucggggugcugauccggggcgccacgccccacuucgacuacaucgccagcgagguguccaaggggcucgcggaccugagccuggagcuccgcaagcccaucaccuucggcgucaucaccgccgacacccuggagcaggccaucgagcgggccgggacgaagcacggcaacaagggcugggaggccgcgcuguccgccaucgagauggccaaccucuucaagagccugcgcggcgggagcggcggguccggcgggagcggcggcuccgggggcgggcaguacaucaaggccaacagcaaguucaucggcaucaccgagcugggcagcggguccggcgcccagacccgguacgcgcccgugaacugggggcacggcgagaucaacgacuccaccaccguggagcccauccucgacgggcccuaccagccgacgaccuucaccccgcccaacgacuacuggauccugaucaacagcaacaccaacggcgucguguacgaguccacgaacaacagcgacuucuggaccgccguggucgccaucgagccccacgugaaccccguggaccgccaguacaccaucuucggggaguccaagcaguucaacgucagcaacgacuccaacaaguggaaguuccuggagauguuccggagcuccagccagaacgaguucuacaaccgccggacccucacguccgacacccgcuucgugggcauccugaaguacggcgggcggguguggaccuuccacggcgagacgccccgcgccaccaccgacagcuccagcaccgccaaccugaacaacaucuccaucaccauccacagcgaguucuacaucaucccccggagccaggaguccaagugcaacgaguacaucaacaacgggcugugaggacuagucccuguucccagagcccacuuuuuuuucuuuuuuugaaauaaaauagccugucuuucagaucuaaaaaaaaaaaaaaaaaaaaaaaaaaaaaaaaaaaaaaaaaaaaaaaaaaaaaaaaaaaaaaaaaaaaaaaaaaaaaaaaaaaaaaaaaaaaaaaaaaaa

SEQ ID NO: 639 - RNA, 1367 nt, Artificial Sequence
  mRNA product Design a-1 (A100) comprising derived and/or modified sequence from RVA/Wa/P[8]__AAA66953.1__LumSynt_P2_VP8*(41-223) (opt1)
aggagagucccgcagucggcguccagcggcucugcuuguucgugugugugucguugcaggccuuauucaagcuuaccaugcagaucuacgagggcaagcugaccgccgaggggcuccgcuucggcaucguggccagccgguucaaccacgcgcuggucgaccgccugguggagggggccaucgacgccaucgugcggcacggcgggcgcgaggaggacaucacccucguccgggugcccggcuccugggagaucccgguggccgccggcgagcuggcccgcaaggaggacaucgacgcggucaucgccaucggggugcugauccggggcgccacgccccacuucgacuacaucgccagcgagguguccaaggggcucgcggaccugagccuggagcuccgcaagcccaucaccuucggcgucaucaccgccgacacccuggagcaggccaucgagcgggccgggacgaagcacggcaacaagggcugggaggccgcgcuguccgccaucgagauggccaaccucuucaagagccugcgcggcgggagcggcggguccggcgggagcggcggcuccgggggcgggcaguacaucaaggccaacagcaaguucaucggcaucaccgagcugggcagcggguccggcgcccagacccgguacgcgcccgugaacugggggcacggcgagaucaacgacuccaccaccguggagcccaugcucgacgggcccuaccagccgacgaccuucaccccgcccaacgacuacuggauccugaucaacagcaacaccaacggcgucguguacgaguccacgaacaacagcgacuucuggaccgccguggucgccaucgagccccacgugaaccccguggaccgccaguacaccaucuucggggaguccaagcaguucaacgucagcaacgacuccaacaaguggaaguuccuggagauguuccggagcuccagccagaacgaguucuacaaccgccggacccucacguccgacacccgcuucgugggcauccugaaguacggcgggcggguguggaccuuccacggcgagacgccccgcgccaccaccgacagcuccagcaccgccaaccugaacaacaucuccaucaccauccacagcgaguucuacaucaucccccggagccaggaguccaagugcaacgaguacaucaacaacgggcugugaggacuagucccuguucccagagcccacuuuuuuuucuuuuuuugaaauaaaauagccugucuuucagaucuaaaaaaaaaaaaaaaaaaaaaaaaaaaaaaaaaaaaaaaaaaaaaaaaaaaaaaaaaaaaaaaaaaaaaaaaaaaaaaaaaaaaaaaaaaaaaaaaaaaa

SEQ ID NO: 640 - RNA, 842 nt, Artificial Sequence
  mRNA product Design a-1 (A100) comprising derived and/or modified sequence from RVA/BE1058/P[4]__AEX30665.1__SP-IgE_P2_VP8*(65-223) (opt1)
aggagagucccgcagucggcguccagcggcucugcuuguucgugugugugucguugcaggccuuauucaagcuuaccauggacuggaccuggauccuguuccucguggccgccgcgacccgcguccacagccaguacaucaaggccaacagcaaguucaucggcaucaccgagcugggcagcggguccggccucgacggccccuaccagcccacgaccuucaagccgcccaacgacuacuggcugcugaucuccagcaacaccgacgggguggucuacgaguccaccaacaacagcgacuucuggacggccgugaucgccguggagccccacgucaaccagaccaaccgccaguacgugcuguucggcgagaacaagcaguucaacaucgagaacuccagcgacaaguggaaguucuucgagauguucaagggcaacucccagagcgacuucuccaaccggcgcacccugaccagcuccaaccggcugguggggaugcucaaguacggcgggcgcgucuggacguuccacggcgagaccccgcgggccaccaccgacagcuccagcacggccgaccugaacaacaucuccaucaucauccacagcgaguucuacaucaucccccgcagccaggaguccaagugcaacgaguacaucaacaacgggcugugaggacuagucccuguucccagagcccacuuuuuuuucuuuuuuugaaauaaaauagccugucuuucagaucuaaaaaaaaaaaaaaaaaaaaaaaaaaaaaaaaaaaaaaaaaaaaaaaaaaaaaaaaaaaaaaaaaaaaaaaaaaaaaaaaaaaaaaaaaaaaaaaaaaaa

SEQ ID NO: 641 - RNA, 842 nt, Artificial Sequence
  mRNA product Design a-1 (A100) comprising derived and/or modified sequence from RVA/DS-1/P[4]__CAD62680.1__SP-IgE_P2_VP8*(65-223) (opt1)
aggagagucccgcagucggcguccagcggcucugcuuguucgugugugugucguugcaggccuuauucaagcuuaccauggacuggaccuggauccuguuccucguggccgccgcgacccgcguccacagccaguacaucaaggccaacagcaaguucaucggcaucaccgagcugggcagcggguccggccucgacgggcccuaccagccgacgaccuucaagccgcccaacgacuacuggcugcugaucuccagcaacaccaacggcguggucuacgaguccaccaacaacaacgacuucuggacggccgugagcuccguggagccccacgucagccagaccaaccgccaguacauccucuucggggagaacaagcaguucaacguggagaacaacuccgacaaguggaaguucuucgagaccuucaccggcagcucccagggcaacuucagcaaccggcgcacgcugaccuccagcaaccggcugguggggaugcucaaguacggcgggcgcgucuggaccuuccacggcgagacgccccgggccaccaccgacuccagcaacaccgccgaccugaacaacaucagcaucaucauccacuccgaguucuacaucaucccccgcagccaggaguccaagugcaacgaguacaucaacaacgggcugugaggacuagucccuguucccagagcccacuuuuuuuucuuuuuuugaaauaaaauagccugucuuucagaucuaaaaaaaaaaaaaaaaaaaaaaaaaaaaaaaaaaaaaaaaaaaaaaaaaaaaaaaaaaaaaaaaaaaaaaaaaaaaaaaaaaaaaaaaaaaaaaaaaaaa

SEQ ID NO: 642 - RNA, 842 nt, Artificial Sequence; identical to SEQ ID NO: 641
  mRNA product Design a-1 (A100) comprising derived and/or modified sequence from RVA/DS-1/P[4]__ABV53252.1__SP-IgE_P2_VP8*(65-223) (opt1)

SEQ ID NO: 643 - RNA, 842 nt, Artificial Sequence
  mRNA product Design a-1 (A100) comprising derived and/or modified sequence from RVA/F01322/P[6]__AFA51886.1__SP-IgE_P2_VP8*(65-223) (opt1)
aggagagucccgcagucggcguccagcggcucugcuuguucgugugugugucguugcaggccuuauucaagcuuaccauggacuggaccuggauccuguuccucguggccgccgcgacccgcguccacagccaguacaucaaggccaacagcaaguucaucggcaucaccgagcugggcagcggguccggccucgacgggcccuaccagccgaccaacuucaagccgcccaacgacuacuggauccugcugaaccccaccaaccagcagguggugcucgagggcacgaacaagaccgacaucugggucgcccugcugcucguggagccgaacgugaccaaccagagccggcaguacacccuguucggggagacgaagcagaucaccgucgagaacaacaccaacaaguggaaguucuucgagauguuccgcuccagcguguccgccgaguuccagcacaagcggacccugacgagcgacaccaagcucgccggcuucaugaaguucuacaacuccguguggaccuuccacggcgagacccccaacgccacgaccgacuacagcuccaccagcaaccuguucgaggucgagaccgugauccacguggaguucuacaucaucccccgcucccaggagagcaagugcuccgaguacaucaacacggggcugugaggacuagucccuguucccagagcccacuuuuuuuucuuuuuuugaaauaaaauagccugucuuucagaucuaaaaaaaaaaaaaaaaaaaaaaaaaaaaaaaaaaaaaaaaaaaaaaaaaaaaaaaaaaaaaaaaaaaaaaaaaaaaaaaaaaaaaaaaaaaaaaaaaaaa

SEQ ID NO: 644 - RNA, 842 nt, Artificial Sequence
  mRNA product Design a-1 (A100) comprising derived and/or modified sequence from RVA/1076/P[6]__AAA47337.1__SP-IgE_P2_VP8*(65-223) (opt1)
aggagagucccgcagucggcguccagcggcucugcuuguucgugugugugucguugcaggccuuauucaagcuuaccauggacuggaccuggauccuguuccucguggccgccgcgacccgcguccacagccaguacaucaaggccaacagcaaguucaucggcaucaccgagcugggcagcggguccggccucgacgggcccuaccagccgaccuccuucaagccgcccagcgacuacuggauccugcugaaccccaccaaccagcaggucgugcucgagggcacgaacaagaccgacaucuggguggcccugcugcucguggagcccaacgugaccaaccagucccggcaguacacccuguucggggagacgaagcagaucaccgucgagaacaacaccaacaaguggaaguucuucgagauguuccgcagcuccgugagcgccgaguuccagcacaagcggacccugacguccgacaccaagcucgccggcuuccugaaguucuacaacagcguguggaccuucuacggcgagacgccccacgccaccaccgacuacuccagcaccuccaaccugagcgaggucgagaccgcgauccacguggaguucuacaucaucccccgcucccaggagagcaagugcaacgaguacaucaacacggggcugugaggacuagucccuguucccagagcccacuuuuuuuucuuuuuuugaaauaaaauagccugucuuucagaucuaaaaaaaaaaaaaaaaaaaaaaaaaaaaaaaaaaaaaaaaaaaaaaaaaaaaaaaaaaaaaaaaaaaaaaaaaaaaaaaaaaaaaaaaaaaaaaaaaaaa

SEQ ID NO: 645 - RNA, 842 nt, Artificial Sequence
  mRNA product Design a-1 (A100) comprising derived and/or modified sequence from RVA/BE1128/P[8]__AEX30671.1__SP-IgE_P2_VP8*(65-223) (opt1)
aggagagucccgcagucggcguccagcggcucugcuuguucgugugugugucguugcaggccuuauucaagcuuaccauggacuggaccuggauccuguuccucguggccgccgcgacccgcguccacagccaguacaucaaggccaacagcaaguucaucggcaucaccgagcugggcagcggguccggccucgacggcccguaccagccgacgaccuucaccccgcccaccgacuacuggauccugaucacguccaacaccaacggggugguguacgagagcaccaacaacuccgacuucuggaccgccgucaucgccguggagccccacgugaacccggucgaccgccaguacaacguguucggcgagaacaagcaguucaacgugcggaacgacagcgacaaguggaaguuccuggagauguuccgcggcuccagccagaacgacuucuacaaccggcgcacgcucaccuccgacacccggcuggucgggauccugaaguacggcgggcgcguguggaccuuccacggcgagacgccccgggccaccaccgacagcuccaacaccgccaaccucgacgggaucagcaucacgauccacuccgaguucuacaucaucccccgcagccaggaguccaagugcaacgaguacaucaacaacggccugugaggacuagucccuguucccagagcccacuuuuuuuucuuuuuuugaaauaaaauagccugucuuucagaucuaaaaaaaaaaaaaaaaaaaaaaaaaaaaaaaaaaaaaaaaaaaaaaaaaaaaaaaaaaaaaaaaaaaaaaaaaaaaaaaaaaaaaaaaaaaaaaaaaaaa

SEQ ID NO: 646 - RNA, 842 nt, Artificial Sequence
  mRNA product Design a-1 (A100) comprising derived and/or modified sequence from RVA/Wa-VirWa/P[8]__ACR22783.1__SP-IgE_P2_VP8*(65-223) (opt1)
aggagagucccgcagucggcguccagcggcucugcuuguucgugugugugucguugcaggccuuauucaagcuuaccauggacuggaccuggauccuguuccucguggccgccgcgacccgcguccacagccaguacaucaaggccaacagcaaguucaucggcaucaccgagcugggcagcggguccggccucgacgggcccuaccagccgacgaccuucaccccgcccaacgacuacuggauccugaucaacagcaacaccaacggcgucguguacgaguccacgaacaacagcgacuucuggaccgccguggucgccaucgagccccacgugaacccgguggaccgccaguacaccaucuucggggaguccaagcaguucaacguccggaacgacagcaacaaguggaaguuccuggagauguuccgcuccagcucccagaacgaguucuacaaccggcgcacccucacgagcgacacccggcuggugggcauccugaaguacggcgggcgcguguggaccuuccacggcgagaccccgcgggccacgaccgacuccagcuccaccgccaaccucaacaacaucagcaucaccauccacuccgaguucuacaucaucccccgcagccaggagagcaagugcaacgaguacaucaacaacgggcugugaggacuagucccuguucccagagcccacuuuuuuuucuuuuuuugaaauaaaauagccugucuuucagaucuaaaaaaaaaaaaaaaaaaaaaaaaaaaaaaaaaaaaaaaaaaaaaaaaaaaaaaaaaaaaaaaaaaaaaaaaaaaaaaaaaaaaaaaaaaaaaaaaaaaa

SEQ ID NO: 647 - RNA, 842 nt, Artificial Sequence
  mRNA product Design a-1 (A100) comprising derived and/or modified sequence from RVA/Wa/P[8]__AAA47290.1__SP-IgE_P2_VP8*(65-223) (opt1)
aggagagucccgcagucggcguccagcggcucugcuuguucgugugugugucguugcaggccuuauucaagcuuaccauggacuggaccuggauccuguuccucguggccgccgcgacccgcguccacagccaguacaucaaggccaacagcaaguucaucggcaucaccgagcugggcagcggguccggccucgacgggcccuaccagccgacgaccuucaccccgcccaacgacuacuggauccugaucaacagcaacaccaacggcgucguguacgaguccacgaacaacagcgacuucuggaccgccguggucgccaucgagccccacgugaaccccguggaccgccaguacaccaucuucggggaguccaagcaguucaacgucagcaacgacuccaacaaguggaaguuccuggagauguuccggagcuccagccagaacgaguucuacaaccgccggacccucacguccgacacccgcuucgugggcauccugaaguacggcgggcggguguggaccuuccacggcgagacgccccgcgccaccaccgacagcuccagcaccgccaaccugaacaacaucuccaucaccauccacagcgaguucuacaucaucccccggagccaggaguccaagugcaacgaguacaucaacaacgggcugugaggacuagucccuguucccagagcccacuuuuuuuucuuuuuuugaaauaaaauagccugucuuucagaucuaaaaaaaaaaaaaaaaaaaaaaaaaaaaaaaaaaaaaaaaaaaaaaaaaaaaaaaaaaaaaaaaaaaaaaaaaaaaaaaaaaaaaaaaaaaaaaaaaaaa

SEQ ID NO: 648 - RNA, 842 nt, Artificial Sequence; identical to SEQ ID NO: 647
  mRNA product Design a-1 (A100) comprising derived and/or modified sequence from RVA/Wa/P[8]__AAA66953.1__SP-IgE_P2_VP8*(65-223) (opt1)

SEQ ID NO: 649 - RNA, 914 nt, Artificial Sequence
  mRNA product Design a-1 (A100) comprising derived and/or modified sequence from RVA/BE1058/P[4]__AEX30665.1__SP-IgE_P2_VP8*(41-223) (opt1)
aggagagucccgcagucggcguccagcggcucugcuuguucgugugugugucguugcaggccuuauucaagcuuaccauggacuggaccuggauccuguuccucguggccgccgcgacccgcguccacagccaguacaucaaggccaacagcaaguucaucggcaucaccgagcugggcagcggguccggcgcccagacccgguacgcgcccgugaacuggggccacggggagaucaacgacagcaccaccgucgagcccgugcucgacggccccuaccagcccacgaccuucaagccgcccaacgacuacuggcugcugaucuccagcaacaccgacgggguggucuacgaguccaccaacaacagcgacuucuggacggccgugaucgccguggagccccacgucaaccagaccaaccgccaguacgugcuguucggcgagaacaagcaguucaacaucgagaacuccagcgacaaguggaaguucuucgagauguucaagggcaacucccagagcgacuucuccaaccggcgcacccugaccagcuccaaccggcugguggggaugcucaaguacggcgggcgcgucuggacguuccacggcgagaccccgcgggccaccaccgacagcuccagcacggccgaccugaacaacaucuccaucaucauccacagcgaguucuacaucaucccccgcagccaggaguccaagugcaacgaguacaucaacaacgggcugugaggacuagucccuguucccagagcccacuuuuuuuucuuuuuuugaaauaaaauagccugucuuucagaucuaaaaaaaaaaaaaaaaaaaaaaaaaaaaaaaaaaaaaaaaaaaaaaaaaaaaaaaaaaaaaaaaaaaaaaaaaaaaaaaaaaaaaaaaaaaaaaaaaaaa

SEQ ID NO: 650 - RNA, 914 nt, Artificial Sequence
  mRNA product Design a-1 (A100) comprising derived and/or modified sequence from RVA/DS-1/P[4]__CAD62680.1__SP-IgE_P2_VP8*(41-223) (opt1)
aggagagucccgcagucggcguccagcggcucugcuuguucgugugugugucguugcaggccuuauucaagcuuaccauggacuggaccuggauccuguuccucguggccgccgcgacccgcguccacagccaguacaucaaggccaacagcaaguucaucggcaucaccgagcugggcagcggguccggcgcccagacccgguacgcgcccgugaacuggggcuccugggagaucaacgacagcaccaccgucgagcccgugcucgacgggcccuaccagccgacgaccuucaagccgcccaacgacuacuggcugcugaucuccagcaacaccaacggcguggucuacgaguccaccaacaacaacgacuucuggacggccgugagcuccguggagccccacgucagccagaccaaccgccaguacauccucuucggggagaacaagcaguucaacguggagaacaacuccgacaaguggaaguucuucgagaccuucaccggcagcucccagggcaacuucagcaaccggcgcacgcugaccuccagcaaccggcugguggggaugcucaaguacggcgggcgcgucuggaccuuccacggcgagacgccccgggccaccaccgacuccagcaacaccgccgaccugaacaacaucagcaucaucauccacuccgaguucuacaucaucccccgcagccaggaguccaagugcaacgaguacaucaacaacgggcugugaggacuagucccuguucccagagcccacuuuuuuuucuuuuuuugaaauaaaauagccugucuuucagaucuaaaaaaaaaaaaaaaaaaaaaaaaaaaaaaaaaaaaaaaaaaaaaaaaaaaaaaaaaaaaaaaaaaaaaaaaaaaaaaaaaaaaaaaaaaaaaaaaaaaa

SEQ ID NO: 651 - RNA, 914 nt, Artificial Sequence; identical to SEQ ID NO: 650
  mRNA product Design a-1 (A100) comprising derived and/or modified sequence from RVA/DS-1/P[4]__ABV53252.1__SP-IgE_P2_VP8*(41-223) (opt1)

SEQ ID NO: 652 - RNA, 914 nt, Artificial Sequence
  mRNA product Design a-1 (A100) comprising derived and/or modified sequence from RVA/F01322/P[6]__AFA51886.1__SP-IgE_P2_VP8*(41-223) (opt1)
aggagagucccgcagucggcguccagcggcucugcuuguucgugugugugucguugcaggccuuauucaagcuuaccauggacuggaccuggauccuguuccucguggccgccgcgacccgcguccacagccaguacaucaaggccaacagcaaguucaucggcaucaccgagcugggcagcggguccggcgcccagaccaacuacgcgcccgugaccuggagccacggcgaggugaacgacuccacgaccaucgagcccguccucgacgggcccuaccagccgaccaacuucaagccgcccaacgacuacuggauccugcugaaccccaccaaccagcagguggugcucgagggcacgaacaagaccgacaucugggucgcccugcugcucguggagccgaacgugaccaaccagagccggcaguacacccuguucggggagacgaagcagaucaccgucgagaacaacaccaacaaguggaaguucuucgagauguuccgcuccagcguguccgccgaguuccagcacaagcggacccugacgagcgacaccaagcucgccggcuucaugaaguucuacaacuccguguggaccuuccacggcgagacccccaacgccacgaccgacuacagcuccaccagcaaccuguucgaggucgagaccgugauccacguggaguucuacaucaucccccgcucccaggagagcaagugcuccgaguacaucaacacggggcugugaggacuagucccuguucccagagcccacuuuuuuuucuuuuuuugaaauaaaauagccugucuuucagaucuaaaaaaaaaaaaaaaaaaaaaaaaaaaaaaaaaaaaaaaaaaaaaaaaaaaaaaaaaaaaaaaaaaaaaaaaaaaaaaaaaaaaaaaaaaaaaaaaaaaa

SEQ ID NO: 653 - RNA, 914 nt, Artificial Sequence
  mRNA product Design a-1 (A100) comprising derived and/or modified sequence from RVA/1076/P[6]__AAA47337.1__SP-IgE_P2_VP8*(41-223) (opt1)
aggagagucccgcagucggcguccagcggcucugcuuguucgugugugugucguugcaggccuuauucaagcuuaccauggacuggaccuggauccuguuccucguggccgccgcgacccgcguccacagccaguacaucaaggccaacagcaaguucaucggcaucaccgagcugggcagcggguccggcgcccagaccaacuacgcgcccgugaccuggagccacggcgaggugaacgacagcacgaccaucgagcccguccucgacgggcccuaccagccgaccuccuucaagccgcccagcgacuacuggauccugcugaaccccaccaaccagcaggucgugcucgagggcacgaacaagaccgacaucuggguggcccugcugcucguggagcccaacgugaccaaccagucccggcaguacacccuguucggggagacgaagcagaucaccgucgagaacaacaccaacaaguggaaguucuucgagauguuccgcagcuccgugagcgccgaguuccagcacaagcggacccugacguccgacaccaagcucgccggcuuccugaaguucuacaacagcguguggaccuucuacggcgagacgccccacgccaccaccgacuacuccagcaccuccaaccugagcgaggucgagaccgcgauccacguggaguucuacaucaucccccgcucccaggagagcaagugcaacgaguacaucaacacggggcugugaggacuagucccuguucccagagcccacuuuuuuuucuuuuuuugaaauaaaauagccugucuuucagaucuaaaaaaaaaaaaaaaaaaaaaaaaaaaaaaaaaaaaaaaaaaaaaaaaaaaaaaaaaaaaaaaaaaaaaaaaaaaaaaaaaaaaaaaaaaaaaaaaaaaa

SEQ ID NO: 654 - RNA, 914 nt, Artificial Sequence
  mRNA product Design a-1 (A100) comprising derived and/or modified sequence from RVA/BE1128/P[8]__AEX30671.1__SP-IgE_P2_VP8*(41-223) (opt1) R8584
aggagagucccgcagucggcguccagcggcucugcuuguucgugugugugucguugcaggccuuauucaagcuuaccauggacuggaccuggauccuguuccucguggccgccgcgacccgcguccacagccaguacaucaaggccaacagcaaguucaucggcaucaccgagcugggcagcggguccggcgcccagacccgguacgcgcccgugaacuggggccacggggagaucaacgacagcaccaccgucgagcccauccucgacggcccguaccagccgacgaccuucaccccgcccaccgacuacuggauccugaucacguccaacaccaacggggugguguacgagagcaccaacaacuccgacuucuggaccgccgucaucgccguggagccccacgugaacccggucgaccgccaguacaacguguucggcgagaacaagcaguucaacgugcggaacgacagcgacaaguggaaguuccuggagauguuccgcggcuccagccagaacgacuucuacaaccggcgcacgcucaccuccgacacccggcuggucgggauccugaaguacggcgggcgcguguggaccuuccacggcgagacgccccgggccaccaccgacagcuccaacaccgccaaccucgacgggaucagcaucacgauccacuccgaguucuacaucaucccccgcagccaggaguccaagugcaacgaguacaucaacaacggccugugaggacuagucccuguucccagagcccacuuuuuuuucuuuuuuugaaauaaaauagccugucuuucagaucuaaaaaaaaaaaaaaaaaaaaaaaaaaaaaaaaaaaaaaaaaaaaaaaaaaaaaaaaaaaaaaaaaaaaaaaaaaaaaaaaaaaaaaaaaaaaaaaaaaaa

SEQ ID NO: 655 - RNA, 914 nt, Artificial Sequence
  mRNA product Design a-1 (A100) comprising derived and/or modified sequence from RVA/Wa-VirWa/P[8]__ACR22783.1__SP-IgE_P2_VP8*(41-223) (opt1)
aggagagucccgcagucggcguccagcggcucugcuuguucgugugugugucguugcaggccuuauucaagcuuaccauggacuggaccuggauccuguuccucguggccgccgcgacccgcguccacagccaguacaucaaggccaacagcaaguucaucggcaucaccgagcugggcagcggguccggcgcccagacccgguacgcgcccgugaacugggggcacggcgagaucaacgacuccaccaccguggagcccauccucgacgggcccuaccagccgacgaccuucaccccgcccaacgacuacuggauccugaucaacagcaacaccaacggcgucguguacgaguccacgaacaacagcgacuucuggaccgccguggucgccaucgagccccacgugaacccgguggaccgccaguacaccaucuucggggaguccaagcaguucaacguccggaacgacagcaacaaguggaaguuccuggagauguuccgcuccagcucccagaacgaguucuacaaccggcgcacccucacgagcgacacccggcuggugggcauccugaaguacggcgggcgcguguggaccuuccacggcgagaccccgcgggccacgaccgacuccagcuccaccgccaaccucaacaacaucagcaucaccauccacuccgaguucuacaucaucccccgcagccaggagagcaagugcaacgaguacaucaacaacgggcugugaggacuagucccuguucccagagcccacuuuuuuuucuuuuuuugaaauaaaauagccugucuuucagaucuaaaaaaaaaaaaaaaaaaaaaaaaaaaaaaaaaaaaaaaaaaaaaaaaaaaaaaaaaaaaaaaaaaaaaaaaaaaaaaaaaaaaaaaaaaaaaaaaaaaa

SEQ ID NO: 656 - RNA, 914 nt, Artificial Sequence
  mRNA product Design a-1 (A100) comprising derived and/or modified sequence from RVA/Wa/P[8]__AAA47290.1__SP-IgE_P2_VP8*(41-223) (opt1)
aggagagucccgcagucggcguccagcggcucugcuuguucgugugugugucguugcaggccuuauucaagcuuaccauggacuggaccuggauccuguuccucguggccgccgcgacccgcguccacagccaguacaucaaggccaacagcaaguucaucggcaucaccgagcugggcagcggguccggcgcccagacccgguacgcgcccgugaacugggggcacggcgagaucaacgacuccaccaccguggagcccauccucgacgggcccuaccagccgacgaccuucaccccgcccaacgacuacuggauccugaucaacagcaacaccaacggcgucguguacgaguccacgaacaacagcgacuucuggaccgccguggucgccaucgagccccacgugaaccccguggaccgccaguacaccaucuucggggaguccaagcaguucaacgucagcaacgacuccaacaaguggaaguuccuggagauguuccggagcuccagccagaacgaguucuacaaccgccggacccucacguccgacacccgcuucgugggcauccugaaguacggcgggcggguguggaccuuccacggcgagacgccccgcgccaccaccgacagcuccagcaccgccaaccugaacaacaucuccaucaccauccacagcgaguucuacaucaucccccggagccaggaguccaagugcaacgaguacaucaacaacgggcugugaggacuagucccuguucccagagcccacuuuuuuuucuuuuuuugaaauaaaauagccugucuuucagaucuaaaaaaaaaaaaaaaaaaaaaaaaaaaaaaaaaaaaaaaaaaaaaaaaaaaaaaaaaaaaaaaaaaaaaaaaaaaaaaaaaaaaaaaaaaaaaaaaaaaa

SEQ ID NO: 657 - RNA, 914 nt, Artificial Sequence
  mRNA product Design a-1 (A100) comprising derived and/or modified sequence from RVA/Wa/P[8]__AAA66953.1__SP-IgE_P2_VP8*(41-223) (opt1)
aggagagucccgcagucggcguccagcggcucugcuuguucgugugugugucguugcaggccuuauucaagcuuaccauggacuggaccuggauccuguuccucguggccgccgcgacccgcguccacagccaguacaucaaggccaacagcaaguucaucggcaucaccgagcugggcagcggguccggcgcccagacccgguacgcgcccgugaacugggggcacggcgagaucaacgacuccaccaccguggagcccaugcucgacgggcccuaccagccgacgaccuucaccccgcccaacgacuacuggauccugaucaacagcaacaccaacggcgucguguacgaguccacgaacaacagcgacuucuggaccgccguggucgccaucgagccccacgugaaccccguggaccgccaguacaccaucuucggggaguccaagcaguucaacgucagcaacgacuccaacaaguggaaguuccuggagauguuccggagcuccagccagaacgaguucuacaaccgccggacccucacguccgacacccgcuucgugggcauccugaaguacggcgggcggguguggaccuuccacggcgagacgccccgcgccaccaccgacagcuccagcaccgccaaccugaacaacaucuccaucaccauccacagcgaguucuacaucaucccccggagccaggaguccaagugcaacgaguacaucaacaacgggcugugaggacuagucccuguucccagagcccacuuuuuuuucuuuuuuugaaauaaaauagccugucuuucagaucuaaaaaaaaaaaaaaaaaaaaaaaaaaaaaaaaaaaaaaaaaaaaaaaaaaaaaaaaaaaaaaaaaaaaaaaaaaaaaaaaaaaaaaaaaaaaaaaaaaaa

SEQ ID NO: 658 - RNA, 791 nt, Artificial Sequence
  mRNA product Design a-1 (A100) comprising derived and/or modified sequence from RVA/BE1058/P[4]__AEX30665.1__P2_VP8*(65-223) (opt1)
aggagagucccgcagucggcguccagcggcucugcuuguucgugugugugucguugcaggccuuauucaagcuuaccaugcaguacaucaaggccaacagcaaguucaucggcaucaccgagcugggguccggcagcgggcucgacggccccuaccagccgaccacguucaagccgcccaacgacuacuggcugcugaucuccagcaacaccgacgggguggucuacgaguccaccaacaacagcgacuucuggaccgccgugaucgcgguggagccccacgucaaccagacgaaccgccaguacguccucuucggcgagaacaagcaguucaacaucgagaacuccagcgacaaguggaaguucuucgagauguucaagggcaacucccagagcgacuucuccaaccggcgcacccugaccagcuccaaccggcugguggggaugcucaaguacggcgggcgcguguggaccuuccacggcgagacgccccgggccaccaccgacagcuccagcaccgccgaccugaacaacaucuccaucaucauccacagcgaguucuacaucaucccccgcucccaggagagcaagugcaacgaguacaucaacaacgggcugugaggacuagucccuguucccagagcccacuuuuuuuucuuuuuuugaaauaaaauagccugucuuucagaucuaaaaaaaaaaaaaaaaaaaaaaaaaaaaaaaaaaaaaaaaaaaaaaaaaaaaaaaaaaaaaaaaaaaaaaaaaaaaaaaaaaaaaaaaaaaaaaaaaaaa

SEQ ID NO: 659 - RNA, 791 nt, Artificial Sequence
  mRNA product Design a-1 (A100) comprising derived and/or modified sequence from RVA/DS-1/P[4]__CAD62680.1__P2_VP8*(65-223) (opt1)
aggagagucccgcagucggcguccagcggcucugcuuguucgugugugugucguugcaggccuuauucaagcuuaccaugcaguacaucaaggccaacagcaaguucaucggcaucaccgagcugggguccggcagcgggcucgacggccccuaccagccgaccacguucaagccgcccaacgacuacuggcugcugaucuccagcaacaccaacgggguggucuacgaguccaccaacaacaacgacuucuggaccgccgugagcuccguggagccccacgucagccagacgaaccgccaguacauccucuucggcgagaacaagcaguucaacguggagaacaacuccgacaaguggaaguucuucgagaccuucaccggcagcucccaggggaacuucagcaaccggcgcacccugacguccagcaaccggcuggugggcaugcucaaguacgggggccgcgucuggaccuuccacggggagacgccccgggcgaccaccgacuccagcaacaccgccgaccugaacaacaucuccaucaucauccacagcgaguucuacaucaucccccgcucccaggagagcaagugcaacgaguacaucaacaacggccugugaggacuagucccuguucccagagcccacuuuuuuuucuuuuuuugaaauaaaauagccugucuuucagaucuaaaaaaaaaaaaaaaaaaaaaaaaaaaaaaaaaaaaaaaaaaaaaaaaaaaaaaaaaaaaaaaaaaaaaaaaaaaaaaaaaaaaaaaaaaaaaaaaaaaa

SEQ ID NO: 660 - RNA, 791 nt, Artificial Sequence; identical to SEQ ID NO: 659
  mRNA product Design a-1 (A100) comprising derived and/or modified sequence from RVA/DS-1/P[4]__ABV53252.1__P2_VP8*(65-223) (opt1)

SEQ ID NO: 661 - RNA, 791 nt, Artificial Sequence
  mRNA product Design a-1 (A100) comprising derived and/or modified sequence from RVA/F01322/P[6]__AFA51886.1__P2_VP8*(65-223) (opt1)
aggagagucccgcagucggcguccagcggcucugcuuguucgugugugugucguugcaggccuuauucaagcuuaccaugcaguacaucaaggccaacagcaaguucaucggcaucaccgagcugggguccggcagcgggcucgacggccccuaccagccgaccaacuucaagccgcccaacgacuacuggauccugcugaaccccacgaaccagcaggucgugcucgaggggaccaacaagaccgacaucuggguggcccugcugcucguggagcccaacgucaccaaccagucccgccaguacacgcuguucggcgagaccaagcagaucaccguggagaacaacaccaacaaguggaaguucuucgagauguuccggagcuccgugagcgcggaguuccagcacaagcgcacgcugaccuccgacaccaagcucgccggcuucaugaaguucuacaacagcgucuggaccuuccacggggagacgcccaacgccaccaccgacuacuccagcaccuccaaccuguucgagguggagacggugauccacgucgaguucuacaucaucccccggagccaggaguccaagugcagcgaguacaucaacaccggccugugaggacuagucccuguucccagagcccacuuuuuuuucuuuuuuugaaauaaaauagccugucuuucagaucuaaaaaaaaaaaaaaaaaaaaaaaaaaaaaaaaaaaaaaaaaaaaaaaaaaaaaaaaaaaaaaaaaaaaaaaaaaaaaaaaaaaaaaaaaaaaaaaaaaaa

SEQ ID NO: 662 - RNA, 791 nt, Artificial Sequence
  mRNA product Design a-1 (A100) comprising derived and/or modified sequence from RVA/1076/P[6]__AAA47337.1__P2_VP8*(65-223) (opt1)
aggagagucccgcagucggcguccagcggcucugcuuguucgugugugugucguugcaggccuuauucaagcuuaccaugcaguacaucaaggccaacagcaaguucaucggcaucaccgagcugggguccggcagcgggcucgacggccccuaccagccgaccuccuucaagccgcccagcgacuacuggauccugcugaaccccacgaaccagcaggucgugcucgaggggaccaacaagaccgacaucuggguggcccugcugcucguggagcccaacgucaccaaccagucccgccaguacacgcuguucggcgagaccaagcagaucaccguggagaacaacaccaacaaguggaaguucuucgagauguuccggagcuccgugagcgcggaguuccagcacaagcgcacgcugaccuccgacaccaagcucgccggcuuccugaaguucuacaacagcgucuggaccuucuacggggagacgccccacgccaccaccgacuacuccagcaccuccaaccugagcgagguggagacggccauccacguggaguucuacaucaucccccggucccaggagagcaagugcaacgaguacaucaacaccggccucugaggacuagucccuguucccagagcccacuuuuuuuucuuuuuuugaaauaaaauagccugucuuucagaucuaaaaaaaaaaaaaaaaaaaaaaaaaaaaaaaaaaaaaaaaaaaaaaaaaaaaaaaaaaaaaaaaaaaaaaaaaaaaaaaaaaaaaaaaaaaaaaaaaaaa

SEQ ID NO: 663 - RNA, 791 nt, Artificial Sequence
  mRNA product Design a-1 (A100) comprising derived and/or modified sequence from RVA/BE1128/P[8]__AEX30671.1__P2_VP8*(65-223) (opt1)
aggagagucccgcagucggcguccagcggcucugcuuguucgugugugugucguugcaggccuuauucaagcuuaccaugcaguacaucaaggccaacagcaaguucaucggcaucaccgagcugggguccggcagcgggcucgacggccccuaccagccgaccacguucaccccgcccaccgacuacuggauccugaucaccuccaacacgaacgggguggucuacgagagcaccaacaacuccgacuucuggaccgccgugaucgcgguggagccccacgucaaccccguggaccgccaguacaacguguucggcgagaacaagcaguucaacguccggaacgacagcgacaaguggaaguuccuggagauguuccgcggcuccagccagaacgacuucuacaaccggcgcacccucacguccgacacccggcugguggggauccugaaguacggcgggcgcguguggaccuuccacggcgagacgccccgggccaccaccgacagcuccaacaccgccaaccucgacgggaucagcaucaccauccacuccgaguucuacaucaucccccgcagccaggaguccaagugcaacgaguacaucaacaacggccugugaggacuagucccuguucccagagcccacuuuuuuuucuuuuuuugaaauaaaauagccugucuuucagaucuaaaaaaaaaaaaaaaaaaaaaaaaaaaaaaaaaaaaaaaaaaaaaaaaaaaaaaaaaaaaaaaaaaaaaaaaaaaaaaaaaaaaaaaaaaaaaaaaaaaa

SEQ ID NO: 664 - RNA, 791 nt, Artificial Sequence
  mRNA product Design a-1 (A100) comprising derived and/or modified sequence from RVA/Wa-VirWa/P[8]__ACR22783.1__P2_VP8*(65-223) (opt1)
aggagagucccgcagucggcguccagcggcucugcuuguucgugugugugucguugcaggccuuauucaagcuuaccaugcaguacaucaaggccaacagcaaguucaucggcaucaccgagcugggguccggcagcgggcucgacggccccuaccagccgaccacguucaccccgcccaacgacuacuggauccugaucaacuccaacaccaacgggguggucuacgagagcaccaacaacuccgacuucuggacggccgugguggcgaucgagccccacgucaaccccguggaccgccaguacaccaucuucggcgagagcaagcaguucaacgugcggaacgacuccaacaaguggaaguuccuggagauguuccgcagcuccagccagaacgaguucuacaaccggcgcacccucaccuccgacacgcggcuggucggcauccugaaguacgggggccgcguguggaccuuccacggggagacgccccgggccaccaccgacagcuccagcaccgccaaccucaacaacaucuccaucaccauccacagcgaguucuacaucaucccccgcucccaggagagcaagugcaacgaguacaucaacaacggccugugaggacuagucccuguucccagagcccacuuuuuuuucuuuuuuugaaauaaaauagccugucuuucagaucuaaaaaaaaaaaaaaaaaaaaaaaaaaaaaaaaaaaaaaaaaaaaaaaaaaaaaaaaaaaaaaaaaaaaaaaaaaaaaaaaaaaaaaaaaaaaaaaaaaaa

SEQ ID NO: 665 - RNA, 791 nt, Artificial Sequence
  mRNA product Design a-1 (A100) comprising derived and/or modified sequence from RVA/Wa/P[8]__AAA47290.1__P2_VP8*(65-223) (opt1)
aggagagucccgcagucggcguccagcggcucugcuuguucgugugugugucguugcaggccuuauucaagcuuaccaugcaguacaucaaggccaacagcaaguucaucggcaucaccgagcugggguccggcagcgggcucgacggccccuaccagccgaccacguucaccccgcccaacgacuacuggauccugaucaacuccaacaccaacgggguggucuacgagagcaccaacaacuccgacuucuggacggccgugguggcgaucgagccccacgucaaccccguggaccgccaguacaccaucuucggcgagagcaagcaguucaacguguccaacgacagcaacaaguggaaguuccuggagauguuccgguccagcucccagaacgaguucuacaaccgccggacccucaccagcgacacgcgcuucgucggcauccugaaguacgggggccggguguggaccuuccacggggagacgccccgcgccaccaccgacuccagcuccaccgccaaccugaacaacaucagcaucaccauccacuccgaguucuacaucaucccccggagccaggaguccaagugcaacgaguacaucaacaacggccucugaggacuagucccuguucccagagcccacuuuuuuuucuuuuuuugaaauaaaauagccugucuuucagaucuaaaaaaaaaaaaaaaaaaaaaaaaaaaaaaaaaaaaaaaaaaaaaaaaaaaaaaaaaaaaaaaaaaaaaaaaaaaaaaaaaaaaaaaaaaaaaaaaaaaa

SEQ ID NO: 666 - RNA, 791 nt, Artificial Sequence; identical to SEQ ID NO: 665
  mRNA product Design a-1 (A100) comprising derived and/or modified sequence from RVA/Wa/P[8]__AAA66953.1__P2_VP8*(65-223) (opt1)

SEQ ID NO: 667 - RNA, 863 nt, Artificial Sequence
  mRNA product Design a-1 (A100) comprising derived and/or modified sequence from RVA/BE1058/P[4]__AEX30665.1__P2_VP8*(41-223) (opt1)
aggagagucccgcagucggcguccagcggcucugcuuguucgugugugugucguugcaggccuuauucaagcuuaccaugcaguacaucaaggccaacagcaaguucaucggcaucaccgagcugggguccggcagcggggcccagacccgcuacgcgcccgugaacuggggccacggggagaucaacgacuccacgaccgucgagccggugcucgacggccccuaccagcccaccaccuucaagcccccgaacgacuacuggcugcugaucagcuccaacacggacggcguggucuacgagagcaccaacaacuccgacuucuggaccgccgugaucgccguggagccccacgucaaccagaccaaccggcaguacguccucuucggggagaacaagcaguucaacaucgagaacagcuccgacaaguggaaguucuucgagauguucaagggcaacagccaguccgacuucagcaaccgccggacgcugaccuccagcaaccgccugguggggaugcucaaguacggcgggcggguguggaccuuccacggcgagacgccccgcgccaccaccgacuccagcuccaccgccgaccugaacaacaucagcaucaucauccacuccgaguucuacaucaucccccggagccaggagagcaagugcaacgaguacaucaacaacggccugugaggacuagucccuguucccagagcccacuuuuuuuucuuuuuuugaaauaaaauagccugucuuucagaucuaaaaaaaaaaaaaaaaaaaaaaaaaaaaaaaaaaaaaaaaaaaaaaaaaaaaaaaaaaaaaaaaaaaaaaaaaaaaaaaaaaaaaaaaaaaaaaaaaaaa

SEQ ID NO: 668 - RNA, 863 nt, Artificial Sequence
  mRNA product Design a-1 (A100) comprising derived and/or modified sequence from RVA/DS-1/P[4]__CAD62680.1__P2_VP8*(41-223) (opt1)
aggagagucccgcagucggcguccagcggcucugcuuguucgugugugugucguugcaggccuuauucaagcuuaccaugcaguacaucaaggccaacagcaaguucaucggcaucaccgagcugggguccggcagcggggcccagacccgcuacgcgcccgugaacuggggcuccugggagaucaacgacagcacgaccgucgagccggugcucgacgggcccuaccagcccaccaccuucaagcccccgaacgacuacuggcugcugaucuccagcaacacgaacggcguggucuacgaguccaccaacaacaacgacuucuggaccgccgugagcuccguggagccccacgucagccagaccaaccggcaguacauccucuucggcgagaacaagcaguucaacguggagaacaacuccgacaaguggaaguucuucgagacguucaccgggagcucccagggcaacuucagcaaccgccggacccugaccuccagcaaccgccugguggggaugcucaaguacggcgggcgggucuggacguuccacggcgagacgccccgcgccaccaccgacuccagcaacaccgccgaccugaacaacaucuccaucaucauccacagcgaguucuacaucaucccccggagccaggaguccaagugcaacgaguacaucaacaacggccugugaggacuagucccuguucccagagcccacuuuuuuuucuuuuuuugaaauaaaauagccugucuuucagaucuaaaaaaaaaaaaaaaaaaaaaaaaaaaaaaaaaaaaaaaaaaaaaaaaaaaaaaaaaaaaaaaaaaaaaaaaaaaaaaaaaaaaaaaaaaaaaaaaaaaa

SEQ ID NO: 669 - RNA, 863 nt, Artificial Sequence; identical to SEQ ID NO: 668
  mRNA product Design a-1 (A100) comprising derived and/or modified sequence from RVA/DS-1/P[4]__ABV53252.1__P2_VP8*(41-223) (opt1)

SEQ ID NO: 670 - RNA, 863 nt, Artificial Sequence
  mRNA product Design a-1 (A100) comprising derived and/or modified sequence from RVA/F01322/P[6]__AFA51886.1__P2_VP8*(41-223) (opt1)
aggagagucccgcagucggcguccagcggcucugcuuguucgugugugugucguugcaggccuuauucaagcuuaccaugcaguacaucaaggccaacagcaaguucaucggcaucaccgagcugggguccggcagcggggcccagaccaacuacgcgcccgugacguggucccacggcgaggucaacgacagcaccaccaucgagccggugcucgacgggcccuaccagcccaccaacuucaagcccccgaacgacuacuggauccugcugaaccccacgaaccagcaggucgugcucgagggcaccaacaagaccgacaucuggguggcccugcugcucguggagcccaacgucaccaaccagucccgccaguacacgcuguucggcgagaccaagcagaucaccguggagaacaacaccaacaaguggaaguucuucgagauguuccggagcuccgugagcgccgaguuccagcacaagcgcacgcugaccuccgacaccaagcucgccggguucaugaaguucuacaacagcgucuggaccuuccacggcgagacgcccaacgccaccaccgacuacuccagcaccuccaaccuguucgagguggagacggugauccacgucgaguucuacaucaucccgcggagccaggaguccaagugcagcgaguacaucaacaccgggcugugaggacuagucccuguucccagagcccacuuuuuuuucuuuuuuugaaauaaaauagccugucuuucagaucuaaaaaaaaaaaaaaaaaaaaaaaaaaaaaaaaaaaaaaaaaaaaaaaaaaaaaaaaaaaaaaaaaaaaaaaaaaaaaaaaaaaaaaaaaaaaaaaaaaaa

SEQ ID NO: 671 - RNA, 863 nt, Artificial Sequence
  mRNA product Design a-1 (A100) comprising derived and/or modified sequence from RVA/1076/P[6]__AAA47337.1__P2_VP8*(41-223) (opt1)
aggagagucccgcagucggcguccagcggcucugcuuguucgugugugugucguugcaggccuuauucaagcuuaccaugcaguacaucaaggccaacagcaaguucaucggcaucaccgagcugggguccggcagcggggcccagaccaacuacgcgcccgugacguggucccacggcgaggucaacgacagcaccaccaucgagccggugcucgacgggcccuaccagcccaccuccuucaagcccccgagcgacuacuggauccugcugaaccccacgaaccagcaggucgugcucgagggcaccaacaagaccgacaucuggguggcccugcugcucguggagcccaacgucaccaaccagucccgccaguacacgcuguucggcgagaccaagcagaucaccguggagaacaacaccaacaaguggaaguucuucgagauguuccggagcuccgugagcgccgaguuccagcacaagcgcacgcugaccuccgacaccaagcucgccggguuccugaaguucuacaacagcgucuggaccuucuacggcgagacgccccacgccaccaccgacuacuccagcaccuccaaccugagcgagguggagacggcgauccacguggaguucuacaucaucccgcggucccaggagagcaagugcaacgaguacaucaacaccgggcucugaggacuagucccuguucccagagcccacuuuuuuuucuuuuuuugaaauaaaauagccugucuuucagaucuaaaaaaaaaaaaaaaaaaaaaaaaaaaaaaaaaaaaaaaaaaaaaaaaaaaaaaaaaaaaaaaaaaaaaaaaaaaaaaaaaaaaaaaaaaaaaaaaaaaa

SEQ ID NO: 672 - RNA, 863 nt, Artificial Sequence
  mRNA product Design a-1 (A100) comprising derived and/or modified sequence from RVA/BE1128/P[8]__AEX30671.1__P2_VP8*(41-223) (opt1)
aggagagucccgcagucggcguccagcggcucugcuuguucgugugugugucguugcaggccuuauucaagcuuaccaugcaguacaucaaggccaacagcaaguucaucggcaucaccgagcugggguccggcagcggggcccagacccgcuacgcgcccgugaacuggggccacggggagaucaacgacuccacgaccgucgagccgauccucgacggccccuaccagcccaccaccuucacgcccccgaccgacuacuggauccugaucaccagcaacaccaacggcgugguguacgaguccacgaacaacagcgacuucuggaccgccgucaucgccguggagccccacgugaaccccgucgaccggcaguacaacguguucggggagaacaagcaguucaacgugcgcaacgacuccgacaaguggaaguuccuggagauguuccggggcagcucccagaacgacuucuacaaccgccggacccucaccagcgacacgcgccuggucgggauccugaaguacggcgggcggguguggaccuuccacggcgagacgccccgcgccaccaccgacuccagcaacaccgccaaccucgacggcaucuccaucaccauccacagcgaguucuacaucaucccgcggucccaggagagcaagugcaacgaguacaucaacaacgggcugugaggacuagucccuguucccagagcccacuuuuuuuucuuuuuuugaaauaaaauagccugucuuucagaucuaaaaaaaaaaaaaaaaaaaaaaaaaaaaaaaaaaaaaaaaaaaaaaaaaaaaaaaaaaaaaaaaaaaaaaaaaaaaaaaaaaaaaaaaaaaaaaaaaaaa

SEQ ID NO: 673 - RNA, 863 nt, Artificial Sequence
  mRNA product Design a-1 (A100) comprising derived and/or modified sequence from RVA/Wa-VirWa/P[8]__ACR22783.1__P2_VP8*(41-223) (opt1)
aggagagucccgcagucggcguccagcggcucugcuuguucgugugugugucguugcaggccuuauucaagcuuaccaugcaguacaucaaggccaacagcaaguucaucggcaucaccgagcugggguccggcagcggggcccagacccgcuacgcgcccgugaacuggggccacggggagaucaacgacuccacgaccgucgagccgauccucgacggccccuaccagcccaccaccuucacgcccccgaacgacuacuggauccugaucaacagcaacaccaacggcgugguguacgaguccaccaacaacagcgacuucuggaccgccgucguggccaucgagccccacgugaaccccgucgaccggcaguacacgaucuucggggaguccaagcaguucaacgugcgcaacgacagcaacaaguggaaguuccuggagauguuccgguccagcucccagaacgaguucuacaaccgccggacccucaccagcgacacccgccuggugggcauccugaaguacgggggccgggucuggacguuccacggggagacgccccgcgccaccaccgacuccagcuccaccgccaaccucaacaacaucagcaucaccauccacuccgaguucuacaucaucccgcggagccaggaguccaagugcaacgaguacaucaacaacggccugugaggacuagucccuguucccagagcccacuuuuuuuucuuuuuuugaaauaaaauagccugucuuucagaucuaaaaaaaaaaaaaaaaaaaaaaaaaaaaaaaaaaaaaaaaaaaaaaaaaaaaaaaaaaaaaaaaaaaaaaaaaaaaaaaaaaaaaaaaaaaaaaaaaaaa

SEQ ID NO: 674 - RNA, 863 nt, Artificial Sequence
  mRNA product Design a-1 (A100) comprising derived and/or modified sequence from RVA/Wa/P[8]__AAA47290.1__P2_VP8*(41-223) (opt1)
aggagagucccgcagucggcguccagcggcucugcuuguucgugugugugucguugcaggccuuauucaagcuuaccaugcaguacaucaaggccaacagcaaguucaucggcaucaccgagcugggguccggcagcggggcccagacccgcuacgcgcccgugaacuggggccacggggagaucaacgacuccacgaccgucgagccgauccucgacggccccuaccagcccaccaccuucacgcccccgaacgacuacuggauccugaucaacagcaacaccaacggcgugguguacgaguccaccaacaacagcgacuucuggaccgccgucguggccaucgagccccacgugaaccccgucgaccggcaguacacgaucuucggggaguccaagcaguucaacgugagcaacgacuccaacaaguggaaguuccuggagauguuccgcagcuccagccagaacgaguucuacaaccggcgcacccucaccuccgacacccgguucgugggcauccugaaguacgggggccgcgucuggacguuccacggggagacgccccgggccaccaccgacagcuccagcaccgccaaccugaacaacaucuccaucaccauccacagcgaguucuacaucaucccgcgcucccaggagagcaagugcaacgaguacaucaacaacggccucugaggacuagucccuguucccagagcccacuuuuuuuucuuuuuuugaaauaaaauagccugucuuucagaucuaaaaaaaaaaaaaaaaaaaaaaaaaaaaaaaaaaaaaaaaaaaaaaaaaaaaaaaaaaaaaaaaaaaaaaaaaaaaaaaaaaaaaaaaaaaaaaaaaaaa

SEQ ID NO: 675 - RNA, 863 nt, Artificial Sequence
  mRNA product Design a-1 (A100) comprising derived and/or modified sequence from RVA/Wa/P[8]__AAA66953.1__P2_VP8*(41-223) (opt1)
aggagagucccgcagucggcguccagcggcucugcuuguucgugugugugucguugcaggccuuauucaagcuuaccaugcaguacaucaaggccaacagcaaguucaucggcaucaccgagcugggguccggcagcggggcccagacccgcuacgcgcccgugaacuggggccacggggagaucaacgacuccacgaccgucgagccgaugcucgacggccccuaccagcccaccaccuucacgcccccgaacgacuacuggauccugaucaacagcaacaccaacggcgugguguacgaguccaccaacaacagcgacuucuggaccgccgucguggccaucgagccccacgugaaccccgucgaccggcaguacacgaucuucggggaguccaagcaguucaacgugagcaacgacuccaacaaguggaaguuccuggagauguuccgcagcuccagccagaacgaguucuacaaccggcgcacccucaccuccgacacccgguucgugggcauccugaaguacgggggccgcgucuggacguuccacggggagacgccccgggccaccaccgacagcuccagcaccgccaaccugaacaacaucuccaucaccauccacagcgaguucuacaucaucccgcgcucccaggagagcaagugcaacgaguacaucaacaacggccucugaggacuagucccuguucccagagcccacuuuuuuuucuuuuuuugaaauaaaauagccugucuuucagaucuaaaaaaaaaaaaaaaaaaaaaaaaaaaaaaaaaaaaaaaaaaaaaaaaaaaaaaaaaaaaaaaaaaaaaaaaaaaaaaaaaaaaaaaaaaaaaaaaaaaa

SEQ ID NO: 676 - RNA, 1289 nt, Artificial Sequence
  mRNA product Design a-1 (A100) comprising derived and/or modified sequence from RVA/BE1058/P[4]__AEX30665.1__P2_VP8*(65-223)_Ferritin (opt1)
aggagagucccgcagucggcguccagcggcucugcuuguucgugugugugucguugcaggccuuauucaagcuuaccaugcaguacaucaaggccaacagcaaguucaucggcaucaccgagcugggguccggcagcgggcucgacggccccuaccagccgaccacguucaagccgcccaacgacuacuggcugcugaucuccagcaacaccgacgggguggucuacgaguccaccaacaacagcgacuucuggaccgccgugaucgcgguggagccccacgucaaccagacgaaccgccaguacguccucuucggcgagaacaagcaguucaacaucgagaacuccagcgacaaguggaaguucuucgagauguucaagggcaacucccagagcgacuucuccaaccggcgcacccugaccagcuccaaccggcugguggggaugcucaaguacggcgggcgcguguggaccuuccacggcgagacgccccgggccaccaccgacagcuccagcaccgccgaccugaacaacaucuccaucaucauccacagcgaguucuacaucaucccccgcucccaggagagcaagugcaacgaguacaucaacaacgggcugagcggcggcgacaucaucaagcuccugaacgagcaggucaacaaggagaugcaguccagcaaccuguacauguccaugagcuccuggugcuacacgcacagccucgacggggccggccuguuccuguucgaccacgccgcggaggaguacgagcacgccaagaagcucaucaucuuccugaacgagaacaacgugcccgugcagcugaccuccaucagcgcccccgagcacaaguucgaggggcucacccagaucuuccagaaggccuacgagcacgagcagcacaucuccgagagcaucaacaacaucguggaccacgcgaucaaguccaaggaccacgccaccuucaacuuccugcagugguacguggccgagcagcacgaggaggagguccuguucaaggacauccucgacaagaucgagcugaucggcaacgagaaccacggccuguaccucgccgaccaguacgugaaggggaucgccaagagccggaaguccugaggacuagucccuguucccagagcccacuuuuuuuucuuuuuuugaaauaaaauagccugucuuucagaucuaaaaaaaaaaaaaaaaaaaaaaaaaaaaaaaaaaaaaaaaaaaaaaaaaaaaaaaaaaaaaaaaaaaaaaaaaaaaaaaaaaaaaaaaaaaaaaaaaaaa

SEQ ID NO: 677 - RNA, 1289 nt, Artificial Sequence
  mRNA product Design a-1 (A100) comprising derived and/or modified sequence from RVA/DS-1/P[4]__CAD62680.1__P2_VP8*(65-223)_Ferritin (opt1)
aggagagucccgcagucggcguccagcggcucugcuuguucgugugugugucguugcaggccuuauucaagcuuaccaugcaguacaucaaggccaacagcaaguucaucggcaucaccgagcugggguccggcagcgggcucgacggccccuaccagccgaccacguucaagccgcccaacgacuacuggcugcugaucuccagcaacaccaacgggguggucuacgaguccaccaacaacaacgacuucuggaccgccgugagcuccguggagccccacgucagccagacgaaccgccaguacauccucuucggcgagaacaagcaguucaacguggagaacaacuccgacaaguggaaguucuucgagaccuucaccggcagcucccaggggaacuucagcaaccggcgcacccugacguccagcaaccggcuggugggcaugcucaaguacgggggccgcgucuggaccuuccacggggagacgccccgggcgaccaccgacuccagcaacaccgccgaccugaacaacaucuccaucaucauccacagcgaguucuacaucaucccccgcucccaggagagcaagugcaacgaguacaucaacaacggccugagcggcggggacaucaucaagcuccugaacgagcaggucaacaaggagaugcaguccagcaaccuguacauguccaugagcuccuggugcuacacccacagccucgacggcgccgggcuguuccuguucgaccacgccgccgaggaguacgagcacgcgaagaagcucaucaucuuccugaacgagaacaacgugcccgugcagcugaccuccaucagcgcccccgagcacaaguucgagggccucacgcagaucuuccagaaggccuacgagcacgagcagcacaucuccgagagcaucaacaacaucguggaccacgccaucaaguccaaggaccacgcgaccuucaacuuccugcagugguacguggccgagcagcacgaggaggagguccuguucaaggacauccucgacaagaucgagcugaucggcaacgagaaccacgggcuguaccucgccgaccaguacgugaagggcaucgccaagagccggaaguccugaggacuagucccuguucccagagcccacuuuuuuuucuuuuuuugaaauaaaauagccugucuuucagaucuaaaaaaaaaaaaaaaaaaaaaaaaaaaaaaaaaaaaaaaaaaaaaaaaaaaaaaaaaaaaaaaaaaaaaaaaaaaaaaaaaaaaaaaaaaaaaaaaaaaa

SEQ ID NO: 678 - RNA, 1289 nt, Artificial Sequence; identical to SEQ ID NO: 677
  mRNA product Design a-1 (A100) comprising derived and/or modified sequence from RVA/DS-1/P[4]__ABV53252.1__P2_VP8*(65-223)_Ferritin (opt1)

SEQ ID NO: 679 - RNA, 1289 nt, Artificial Sequence
  mRNA product Design a-1 (A100) comprising derived and/or modified sequence from RVA/F01322/P[6]__AFA51886.1__P2_VP8*(65-223)_Ferritin (opt1)
aggagagucccgcagucggcguccagcggcucugcuuguucgugugugugucguugcaggccuuauucaagcuuaccaugcaguacaucaaggccaacagcaaguucaucggcaucaccgagcugggguccggcagcgggcucgacggccccuaccagccgaccaacuucaagccgcccaacgacuacuggauccugcugaaccccacgaaccagcaggucgugcucgaggggaccaacaagaccgacaucuggguggcccugcugcucguggagcccaacgucaccaaccagucccgccaguacacgcuguucggcgagaccaagcagaucaccguggagaacaacaccaacaaguggaaguucuucgagauguuccggagcuccgugagcgcggaguuccagcacaagcgcacgcugaccuccgacaccaagcucgccggcuucaugaaguucuacaacagcgucuggaccuuccacggggagacgcccaacgccaccaccgacuacuccagcaccuccaaccuguucgagguggagacggugauccacgucgaguucuacaucaucccccggagccaggaguccaagugcagcgaguacaucaacaccggccuguccgggggcgacaucaucaagcuccugaacgagcaggucaacaaggagaugcagagcuccaaccuguacaugagcauguccagcuggugcuacacccacagccucgacggggccggccuguuccuguucgaccacgccgcggaggaguacgagcacgccaagaagcucaucaucuuccugaacgagaacaacgugcccgugcagcugaccuccaucagcgccccggagcacaaguucgagggccucacgcagaucuuccagaaggccuacgagcacgagcagcacaucuccgagagcaucaacaacaucguggaccacgcgaucaaguccaaggaccacgccaccuucaacuuccugcagugguacguggccgagcagcacgaggaggagguccuguucaaggacauccucgacaagaucgagcugaucgggaacgagaaccacggccuguaccucgccgaccaguacgugaaggggaucgccaagagccgcaaguccugaggacuagucccuguucccagagcccacuuuuuuuucuuuuuuugaaauaaaauagccugucuuucagaucuaaaaaaaaaaaaaaaaaaaaaaaaaaaaaaaaaaaaaaaaaaaaaaaaaaaaaaaaaaaaaaaaaaaaaaaaaaaaaaaaaaaaaaaaaaaaaaaaaaaa

SEQ ID NO: 680 - RNA, 1289 nt, Artificial Sequence
  mRNA product Design a-1 (A100) comprising derived and/or modified sequence from RVA/1076/P[6]__AAA47337.1__P2_VP8*(65-223)_Ferritin (opt1)
aggagagucccgcagucggcguccagcggcucugcuuguucgugugugugucguugcaggccuuauucaagcuuaccaugcaguacaucaaggcgaacagcaaguucaucggcaucaccgagcugggguccggcagcgggcucgacggccccuaccagccgaccuccuucaagccgcccagcgacuacuggauccugcugaaccccacgaaccagcaggucgugcucgaggggaccaacaagaccgacaucuggguggcccugcugcucguggagcccaacgucaccaaccagucccgccaguacacgcuguucggcgagaccaagcagaucaccguggagaacaacaccaacaaguggaaguucuucgagauguuccggagcuccgugagcgcggaguuccagcacaagcgcacgcugaccuccgacaccaagcucgccggcuuccugaaguucuacaacagcgucuggaccuucuacggggagacgccccacgccaccaccgacuacuccagcaccuccaaccugagcgagguggagacggccauccacguggaguucuacaucaucccccggucccaggagagcaagugcaacgaguacaucaacaccggccucuccgggggcgacaucaucaagcugcugaacgagcaggucaacaaggagaugcagagcuccaaccucuacaugagcaugagcuccuggugcuacacccacagccuggacggggccggccuguuccucuucgaccacgcggccgaggaguacgagcacgccaagaagcugaucaucuuccugaacgagaacaacgugcccgugcagcucaccuccaucagcgccccggagcacaaguucgagggccugacgcagaucuuccagaaggcguacgagcacgagcagcacaucuccgagagcaucaacaacaucgucgaccacgccaucaaguccaaggaccacgccaccuucaacuuccugcagugguacguggccgagcagcacgaggaggagguccucuucaaggacauccuggacaagaucgagcugaucgggaacgagaaccacggccucuaccuggccgaccaguacgugaaggggaucgccaagagccgcaaguccugaggacuagucccuguucccagagcccacuuuuuuuucuuuuuuugaaauaaaauagccugucuuucagaucuaaaaaaaaaaaaaaaaaaaaaaaaaaaaaaaaaaaaaaaaaaaaaaaaaaaaaaaaaaaaaaaaaaaaaaaaaaaaaaaaaaaaaaaaaaaaaaaaaaaa

SEQ ID NO: 681 - RNA, 1289 nt, Artificial Sequence
  mRNA product Design a-1 (A100) comprising derived and/or modified sequence from RVA/BE1128/P[8]__AEX30671.1__P2_VP8*(65-223)_Ferritin (opt1)
aggagagucccgcagucggcguccagcggcucugcuuguucgugugugugucguugcaggccuuauucaagcuuaccaugcaguacaucaaggccaacagcaaguucaucggcaucaccgagcugggguccggcagcgggcucgacggccccuaccagccgaccacguucaccccgcccaccgacuacuggauccugaucaccuccaacacgaacgggguggucuacgagagcaccaacaacuccgacuucuggaccgccgugaucgcgguggagccccacgucaaccccguggaccggcaguacaacguguucggcgagaacaagcaguucaacguccggaacgacagcgacaaguggaaguuccuggagauguuccgcggcuccagccagaacgacuucuacaaccggcgcacccucacguccgacacccggcugguggggauccugaaguacggcgggcgcguguggaccuuccacggcgagacgccccgggccaccaccgacagcuccaacaccgccaaccucgacgggaucagcaucaccauccacuccgaguucuacaucaucccccgcagccaggaguccaagugcaacgaguacaucaacaacggccugagcggcggggacaucaucaagcugcucaacgagcaggucaacaaggagaugcaguccagcaaccuguacauguccaugagcagcuggugcuacacgcacucccuggacggcgccggccucuuccuguucgaccacgccgcggaggaguacgagcacgccaagaagcugaucaucuuccucaacgagaacaacgugcccgugcagcugaccagcaucuccgccccggagcacaaguucgaggggcugacccagaucuuccagaaggccuacgagcacgagcagcacaucagcgaguccaucaacaacaucgucgaccacgcgaucaagagcaaggaccacgccaccuucaacuuccuccagugguacguggccgagcagcacgaggaggaggugcuguucaaggacauccuggacaagaucgagcucaucggcaacgagaaccacgggcuguaccuggccgaccaguacgucaagggcaucgccaagucccgcaagagcugaggacuagucccuguucccagagcccacuuuuuuuucuuuuuuugaaauaaaauagccugucuuucagaucuaaaaaaaaaaaaaaaaaaaaaaaaaaaaaaaaaaaaaaaaaaaaaaaaaaaaaaaaaaaaaaaaaaaaaaaaaaaaaaaaaaaaaaaaaaaaaaaaaaaa

SEQ ID NO: 682 - RNA, 1289 nt, Artificial Sequence
  mRNA product Design a-1 (A100) comprising derived and/or modified sequence from RVA/Wa-VirWa/P[8]__ACR22783.1__P2_VP8*(65-223)_Ferritin (opt1)
aggagagucccgcagucggcguccagcggcucugcuuguucgugugugugucguugcaggccuuauucaagcuuaccaugcaguacaucaaggccaacagcaaguucaucggcaucaccgagcugggguccggcagcgggcucgacggccccuaccagccgaccacguucaccccgcccaacgacuacuggauccugaucaacuccaacaccaacgggguggucuacgagagcaccaacaacuccgacuucuggacggccgugguggcgaucgagccccacgucaaccccguggaccgccaguacaccaucuucggcgagagcaagcaguucaacgugcggaacgacuccaacaaguggaaguuccuggagauguuccgcagcuccagccagaacgaguucuacaaccggcgcacccucaccuccgacacgcggcuggucggcauccugaaguacgggggccgcguguggaccuuccacggggagacgccccgggccaccaccgacagcuccagcaccgccaaccucaacaacaucuccaucaccauccacagcgaguucuacaucaucccccgcucccaggagagcaagugcaacgaguacaucaacaacggccuguccgggggcgacaucaucaagcugcucaacgagcaggucaacaaggagaugcagagcagcaaccuguacauguccaugagcuccuggugcuacacccacagccuggacggcgccggccucuuccuguucgaccacgccgcggaggaguacgagcacgccaagaagcugaucaucuuccucaacgagaacaacgugcccgugcagcugacguccaucagcgccccggagcacaaguucgaggggcugacccagaucuuccagaaggccuacgagcacgagcagcacaucuccgagagcaucaacaacaucguggaccacgcgaucaaguccaaggaccacgccaccuucaacuuccuccagugguacgucgccgagcagcacgaggaggaggugcuguucaaggacauccuggacaagaucgagcucaucgggaacgagaaccacggccuguaccuggccgaccaguacgugaagggcaucgccaagagccggaaguccugaggacuagucccuguucccagagcccacuuuuuuuucuuuuuuugaaauaaaauagccugucuuucagaucuaaaaaaaaaaaaaaaaaaaaaaaaaaaaaaaaaaaaaaaaaaaaaaaaaaaaaaaaaaaaaaaaaaaaaaaaaaaaaaaaaaaaaaaaaaaaaaaaaaaa

SEQ ID NO: 683 - RNA, 1289 nt, Artificial Sequence
  mRNA product Design a-1 (A100) comprising derived and/or modified sequence from RVA/Wa/P[8]__AAA47290.1__P2_VP8*(65-223)_Ferritin (opt1)
aggagagucccgcagucggcguccagcggcucugcuuguucgugugugugucguugcaggccuuauucaagcuuaccaugcaguacaucaaggccaacagcaaguucaucggcaucaccgagcugggguccggcagcgggcucgacggccccuaccagccgaccacguucaccccgcccaacgacuacuggauccugaucaacuccaacaccaacggggugguguacgagagcaccaacaacuccgacuucuggacggccgugguggcgaucgagccccacgucaaccccguggaccgccaguacaccaucuucggcgagagcaagcaguucaacguguccaacgacagcaacaaguggaaguuccuggagauguuccgguccagcucccagaacgaguucuacaaccgccggacccucaccagcgacacgcgcuucgucggcauccugaaguacgggggccggguguggaccuuccacggggagacgccccgcgccaccaccgacuccagcuccaccgccaaccugaacaacaucagcaucaccauccacuccgaguucuacaucaucccccggagccaggaguccaagugcaacgaguacaucaacaacggccucagcgggggcgacaucaucaagcugcugaacgagcaggucaacaaggagaugcagagcuccaaccucuacaugagcauguccagcuggugcuacacccacucccuggacggcgccgggcuguuccucuucgaccacgccgcggaggaguacgagcacgccaagaagcugaucaucuuccugaacgagaacaacgugcccgugcagcucacgagcaucuccgccccggagcacaaguucgagggccugacccagaucuuccagaaggccuacgagcacgagcagcacaucagcgaguccaucaacaacaucguggaccacgcgaucaagagcaaggaccacgccaccuucaacuuccugcagugguacgucgccgagcagcacgaggaggagguccucuucaaggacauccuggacaagaucgagcugaucgggaacgagaaccacggccucuaccuggccgaccaguacgugaagggcaucgccaagucccgcaagagcugaggacuagucccuguucccagagcccacuuuuuuuucuuuuuuugaaauaaaauagccugucuuucagaucuaaaaaaaaaaaaaaaaaaaaaaaaaaaaaaaaaaaaaaaaaaaaaaaaaaaaaaaaaaaaaaaaaaaaaaaaaaaaaaaaaaaaaaaaaaaaaaaaaaaa

SEQ ID NO: 684 - RNA, 1289 nt, Artificial Sequence; identical to SEQ ID NO: 683
  mRNA product Design a-1 (A100) comprising derived and/or modified sequence from RVA/Wa/P[8]__AAA66953.1__P2_VP8*(65-223)_Ferritin (opt1)

SEQ ID NO: 685 - RNA, 1361 nt, Artificial Sequence
  mRNA product Design a-1 (A100) comprising derived and/or modified sequence from RVA/BE1058/P[4]__AEX30665.1__P2_VP8*(41-223)_Ferritin (opt1)
aggagagucccgcagucggcguccagcggcucugcuuguucgugugugugucguugcaggccuuauucaagcuuaccaugcaguacaucaaggccaacagcaaguucaucggcaucaccgagcugggguccggcagcggggcccagacccgcuacgcgcccgugaacuggggccacggggagaucaacgacuccacgaccgucgagccggugcucgacggccccuaccagcccaccaccuucaagcccccgaacgacuacuggcugcugaucagcuccaacacggacggcguggucuacgagagcaccaacaacuccgacuucuggaccgccgugaucgccguggagccccacgucaaccagaccaaccggcaguacguccucuucggggagaacaagcaguucaacaucgagaacagcuccgacaaguggaaguucuucgagauguucaagggcaacagccaguccgacuucagcaaccgccggacgcugaccuccagcaaccgccugguggggaugcucaaguacggcgggcggguguggaccuuccacggcgagacgccccgcgccaccaccgacuccagcuccaccgccgaccugaacaacaucagcaucaucauccacuccgaguucuacaucaucccccggagccaggagagcaagugcaacgaguacaucaacaacggccuguccgggggcgacaucaucaagcuccugaacgagcaggucaacaaggagaugcagagcuccaaccuguacaugagcauguccagcuggugcuacacccacucccucgacggggcgggccuguuccuguucgaccacgccgccgaggaguacgagcacgccaagaagcucaucaucuuccugaacgagaacaacgugccggugcagcugacgagcaucuccgcgcccgagcacaaguucgagggccucacccagaucuuccagaaggccuacgagcacgagcagcacaucagcgaguccaucaacaacaucguggaccacgccaucaagagcaaggaccacgccaccuucaacuuccugcagugguacguggccgagcagcacgaggaggagguccuguucaaggacauccucgacaagaucgagcugaucgggaacgagaaccacggccuguaccucgcggaccaguacgugaaggggaucgccaagucccgcaagagcugaggacuagucccuguucccagagcccacuuuuuuuucuuuuuuugaaauaaaauagccugucuuucagaucuaaaaaaaaaaaaaaaaaaaaaaaaaaaaaaaaaaaaaaaaaaaaaaaaaaaaaaaaaaaaaaaaaaaaaaaaaaaaaaaaaaaaaaaaaaaaaaaaaaaa

SEQ ID NO: 686 - RNA, 1361 nt, Artificial Sequence
  mRNA product Design a-1 (A100) comprising derived and/or modified sequence from RVA/DS-1/P[4]__CAD62680.1__P2_VP8*(41-223)_Ferritin (opt1)
aggagagucccgcagucggcguccagcggcucugcuuguucgugugugugucguugcaggccuuauucaagcuuaccaugcaguacaucaaggcgaacagcaaguucaucggcaucaccgagcugggguccggcagcggggcccagacccgcuacgcgcccgugaacuggggcuccugggagaucaacgacagcacgaccgucgagccggugcucgacgggcccuaccagcccaccaccuucaagcccccgaacgacuacuggcugcugaucuccagcaacacgaacggcguggucuacgaguccaccaacaacaacgacuucuggaccgccgugagcuccguggagccccacgucagccagaccaaccggcaguacauccucuucggcgagaacaagcaguucaacguggagaacaacuccgacaaguggaaguucuucgagacguucaccgggagcucccagggcaacuucagcaaccgccggacccugaccuccagcaaccgccugguggggaugcucaaguacggcgggcgggucuggacguuccacggcgagacgccccgcgccaccaccgacuccagcaacaccgccgaccugaacaacaucuccaucaucauccacagcgaguucuacaucaucccccggagccaggaguccaagugcaacgaguacaucaacaacggccugagcgggggcgacaucaucaagcuccugaacgagcaggucaacaaggagaugcaguccagcaaccuguacauguccaugagcuccuggugcuacacccacagccucgacggggccggccuguuccuguucgaccacgcggccgaggaguacgagcacgccaagaagcucaucaucuuccugaacgagaacaacgugccggugcagcugaccuccaucagcgcccccgagcacaaguucgagggccucacccagaucuuccagaaggcguacgagcacgagcagcacaucuccgagagcaucaacaacaucguggaccacgccaucaaguccaaggaccacgccacguucaacuuccugcagugguacguggccgagcagcacgaggaggagguccuguucaaggacauccucgacaagaucgagcugaucgggaacgagaaccacggccuguaccucgccgaccaguacgugaaggggaucgccaagagccgcaaguccugaggacuagucccuguucccagagcccacuuuuuuuucuuuuuuugaaauaaaauagccugucuuucagaucuaaaaaaaaaaaaaaaaaaaaaaaaaaaaaaaaaaaaaaaaaaaaaaaaaaaaaaaaaaaaaaaaaaaaaaaaaaaaaaaaaaaaaaaaaaaaaaaaaaaa

SEQ ID NO: 687 - RNA, 1361 nt, Artificial Sequence; identical to SEQ ID NO: 686
  mRNA product Design a-1 (A100) comprising derived and/or modified sequence from RVA/DS-1/P[4]__ABV53252.1__P2_VP8*(41-223)_Ferritin (opt1)

SEQ ID NO: 688 - RNA, 1361 nt, Artificial Sequence
  mRNA product Design a-1 (A100) comprising derived and/or modified sequence from RVA/F01322/P[6]__AFA51886.1__P2_VP8*(41-223)_Ferritin (opt1)
aggagagucccgcagucggcguccagcggcucugcuuguucgugugugugucguugcaggccuuauucaagcuuaccaugcaguacaucaaggccaacagcaaguucaucggcaucaccgagcugggguccggcagcggggcccagaccaacuacgcgcccgugacguggucccacggcgaggucaacgacagcaccaccaucgagccggugcucgacgggcccuaccagcccaccaacuucaagcccccgaacgacuacuggauccugcugaaccccacgaaccagcaggucgugcucgagggcaccaacaagaccgacaucuggguggcccugcugcucguggagcccaacgucaccaaccagucccgccaguacacgcuguucggcgagaccaagcagaucaccguggagaacaacaccaacaaguggaaguucuucgagauguuccggagcuccgugagcgccgaguuccagcacaagcgcacgcugaccuccgacaccaagcucgccggguucaugaaguucuacaacagcgucuggaccuuccacggcgagacgcccaacgccaccaccgacuacuccagcaccuccaaccuguucgagguggagacggugauccacgucgaguucuacaucaucccgcggagccaggaguccaagugcagcgaguacaucaacaccgggcuguccggcggggacaucaucaagcuccugaacgagcaggucaacaaggagaugcagagcuccaaccuguacaugagcaugagcuccuggugcuacacccacagccucgacggcgcgggccuguuccuguucgaccacgccgccgaggaguacgagcacgccaagaagcucaucaucuuccugaacgagaacaacgugcccgugcagcugaccuccaucagcgcgcccgagcacaaguucgaggggcucacgcagaucuuccagaaggccuacgagcacgagcagcacaucuccgagagcaucaacaacaucguggaccacgccaucaaguccaaggaccacgccaccuucaacuuccugcagugguacguggccgagcagcacgaggaggagguccuguucaaggacauccucgacaagaucgagcugaucggcaacgagaaccacgggcuguaccucgcggaccaguacgugaagggcaucgccaagagccgcaaguccugaggacuagucccuguucccagagcccacuuuuuuuucuuuuuuugaaauaaaauagccugucuuucagaucuaaaaaaaaaaaaaaaaaaaaaaaaaaaaaaaaaaaaaaaaaaaaaaaaaaaaaaaaaaaaaaaaaaaaaaaaaaaaaaaaaaaaaaaaaaaaaaaaaaaa

SEQ ID NO: 689 - RNA, 1361 nt, Artificial Sequence
  mRNA product Design a-1 (A100) comprising derived and/or modified sequence from RVA/1076/P[6]__AAA47337.1__P2_VP8*(41-223)_Ferritin (opt1)
aggagagucccgcagucggcguccagcggcucugcuuguucgugugugugucguugcaggccuuauucaagcuuaccaugcaguacaucaaggccaacagcaaguucaucggcaucaccgagcugggguccggcagcggggcccagaccaacuacgcgcccgugacguggucccacggcgaggucaacgacagcaccaccaucgagccggugcucgacgggcccuaccagcccaccuccuucaagcccccgagcgacuacuggauccugcugaaccccacgaaccagcaggucgugcucgagggcaccaacaagaccgacaucuggguggcccugcugcucguggagcccaacgucaccaaccagucccgccaguacacgcuguucggcgagaccaagcagaucaccguggagaacaacaccaacaaguggaaguucuucgagauguuccggagcuccgugagcgccgaguuccagcacaagcgcacgcugaccuccgacaccaagcucgccggguuccugaaguucuacaacagcgucuggaccuucuacggcgagacgccccacgccaccaccgacuacuccagcaccuccaaccugagcgagguggagacggcgauccacguggaguucuacaucaucccgcggucccaggagagcaagugcaacgaguacaucaacaccgggcucuccggcggggacaucaucaagcugcugaacgagcaggucaacaaggagaugcagagcagcaaccucuacauguccaugagcuccuggugcuacacccacagccuggacggcgccggccuguuccucuucgaccacgccgccgaggaguacgagcacgcgaagaagcugaucaucuuccugaacgagaacaacgugcccgugcagcucaccuccaucagcgcccccgagcacaaguucgaggggcugacgcagaucuuccagaaggccuacgagcacgagcagcacaucuccgagagcaucaacaacaucgucgaccacgccaucaaguccaaggaccacgccaccuucaacuuccugcagugguacguggcggagcagcacgaggaggagguccucuucaaggacauccuggacaagaucgagcugaucggcaacgagaaccacgggcucuaccuggccgaccaguacgugaagggcaucgccaagagccgcaaguccugaggacuagucccuguucccagagcccacuuuuuuuucuuuuuuugaaauaaaauagccugucuuucagaucuaaaaaaaaaaaaaaaaaaaaaaaaaaaaaaaaaaaaaaaaaaaaaaaaaaaaaaaaaaaaaaaaaaaaaaaaaaaaaaaaaaaaaaaaaaaaaaaaaaaa

SEQ ID NO: 690 - RNA, 1361 nt, Artificial Sequence
  mRNA product Design a-1 (A100) comprising derived and/or modified sequence from RVA/BE1128/P[8]__AEX30671.1__P2_VP8*(41-223)_Ferritin (opt1)
aggagagucccgcagucggcguccagcggcucugcuuguucgugugugugucguugcaggccuuauucaagcuuaccaugcaguacaucaaggccaacagcaaguucaucggcaucaccgagcugggguccggcagcggggcccagacccgcuacgcgcccgugaacuggggccacggggagaucaacgacuccacgaccgucgagccgauccucgacggccccuaccagcccaccaccuucacgcccccgaccgacuacuggauccugaucaccagcaacaccaacggcgugguguacgaguccacgaacaacagcgacuucuggaccgccgucaucgccguggagccccacgugaaccccgucgaccggcaguacaacguguucggggagaacaagcaguucaacgugcgcaacgacuccgacaaguggaaguuccuggagauguuccggggcagcucccagaacgacuucuacaaccgccggacccucaccagcgacacgcgccuggucgggauccugaaguacggcgggcggguguggaccuuccacggcgagacgccccgcgccaccaccgacuccagcaacaccgccaaccucgacggcaucuccaucaccauccacagcgaguucuacaucaucccgcggucccaggagagcaagugcaacgaguacaucaacaacgggcuguccggcggggacaucaucaagcugcucaacgagcaggucaacaaggagaugcagagcuccaaccuguacaugagcaugagcuccuggugcuacacccacagccuggacggcgcgggccucuuccuguucgaccacgccgccgaggaguacgagcacgccaagaagcugaucaucuuccucaacgagaacaacgugcccgugcagcugacguccaucagcgcgcccgagcacaaguucgaggggcugacccagaucuuccagaaggccuacgagcacgagcagcacaucuccgagagcaucaacaacaucguggaccacgccaucaaguccaaggaccacgccaccuucaacuuccuccagugguacgucgccgagcagcacgaggaggaggugcuguucaaggacauccuggacaagaucgagcucaucggcaacgagaaccacgggcuguaccuggcggaccaguacgugaagggcaucgccaagagccgcaaguccugaggacuagucccuguucccagagcccacuuuuuuuucuuuuuuugaaauaaaauagccugucuuucagaucuaaaaaaaaaaaaaaaaaaaaaaaaaaaaaaaaaaaaaaaaaaaaaaaaaaaaaaaaaaaaaaaaaaaaaaaaaaaaaaaaaaaaaaaaaaaaaaaaaaaa

SEQ ID NO: 691 - RNA, 1361 nt, Artificial Sequence
  mRNA product Design a-1 (A100) comprising derived and/or modified sequence from RVA/Wa-VirWa/P[8]__ACR22783.1__P2_VP8*(41-223)_Ferritin (opt1)
aggagagucccgcagucggcguccagcggcucugcuuguucgugugugugucguugcaggccuuauucaagcuuaccaugcaguacaucaaggccaacagcaaguucaucggcaucaccgagcugggguccggcagcggggcccagacccgcuacgcgcccgugaacuggggccacggggagaucaacgacuccacgaccgucgagccgauccucgacggccccuaccagcccaccaccuucacgcccccgaacgacuacuggauccugaucaacagcaacaccaacggcgugguguacgaguccaccaacaacagcgacuucuggaccgccgucguggccaucgagccccacgugaaccccgucgaccggcaguacacgaucuucggggaguccaagcaguucaacgugcgcaacgacagcaacaaguggaaguuccuggagauguuccgguccagcucccagaacgaguucuacaaccgccggacccucaccagcgacacccgccuggugggcauccugaaguacgggggccgggucuggacguuccacggggagacgccccgcgccaccaccgacuccagcuccaccgccaaccucaacaacaucagcaucaccauccacuccgaguucuacaucaucccgcggagccaggaguccaagugcaacgaguacaucaacaacggccugagcggcggggacaucaucaagcugcucaacgagcaggucaacaaggagaugcagagcuccaaccuguacaugagcauguccagcuggugcuacacccacucccuggacggcgcgggccucuuccuguucgaccacgccgccgaggaguacgagcacgccaagaagcugaucaucuuccucaacgagaacaacgugcccgugcagcugaccagcaucuccgcgcccgagcacaaguucgaggggcugacgcagaucuuccagaaggccuacgagcacgagcagcacaucagcgaguccaucaacaacaucguggaccacgccaucaagagcaaggaccacgccaccuucaacuuccuccagugguacguggccgagcagcacgaggaggagguccuguucaaggacauccuggacaagaucgagcucaucggcaacgagaaccacgggcuguaccuggcggaccaguacgugaagggcaucgccaagucccgcaagagcugaggacuagucccuguucccagagcccacuuuuuuuucuuuuuuugaaauaaaauagccugucuuucagaucuaaaaaaaaaaaaaaaaaaaaaaaaaaaaaaaaaaaaaaaaaaaaaaaaaaaaaaaaaaaaaaaaaaaaaaaaaaaaaaaaaaaaaaaaaaaaaaaaaaaa

SEQ ID NO: 692 - RNA, 1361 nt, Artificial Sequence
  mRNA product Design a-1 (A100) comprising derived and/or modified sequence from RVA/Wa/P[8]__AAA47290.1__P2_VP8*(41-223)_Ferritin (opt1)
aggagagucccgcagucggcguccagcggcucugcuuguucgugugugugucguugcaggccuuauucaagcuuaccaugcaguacaucaaggccaacagcaaguucaucggcaucaccgagcugggguccggcagcggggcccagacccgcuacgcgcccgugaacuggggccacggggagaucaacgacuccacgaccgucgagccgauccucgacggccccuaccagcccaccaccuucacgcccccgaacgacuacuggauccugaucaacagcaacaccaacggcgugguguacgaguccaccaacaacagcgacuucuggaccgccgucguggccaucgagccccacgugaaccccgucgaccggcaguacacgaucuucggggaguccaagcaguucaacgugagcaacgacuccaacaaguggaaguuccuggagauguuccgcagcuccagccagaacgaguucuacaaccggcgcacccucaccuccgacacccgguucgugggcauccugaaguacgggggccgcgucuggacguuccacggggagacgccccgggccaccaccgacagcuccagcaccgccaaccugaacaacaucuccaucaccauccacagcgaguucuacaucaucccgcgcucccaggagagcaagugcaacgaguacaucaacaacggccucagcggcggggacaucaucaagcugcugaacgagcaggucaacaaggagaugcaguccagcaaccucuacauguccaugagcuccuggugcuacacccacagccuggacggcgcggggcuguuccucuucgaccacgccgccgaggaguacgagcacgccaagaagcugaucaucuuccugaacgagaacaacgugcccgugcagcucaccuccaucagcgcgcccgagcacaaguucgagggccugacgcagaucuuccagaaggccuacgagcacgagcagcacaucuccgagagcaucaacaacaucguggaccacgccaucaaguccaaggaccacgccaccuucaacuuccugcagugguacguggccgagcagcacgaggaggagguccucuucaaggacauccuggacaagaucgagcugaucggcaacgagaaccacgggcucuaccuggcggaccaguacgugaagggcaucgccaagagccggaaguccugaggacuagucccuguucccagagcccacuuuuuuuucuuuuuuugaaauaaaauagccugucuuucagaucuaaaaaaaaaaaaaaaaaaaaaaaaaaaaaaaaaaaaaaaaaaaaaaaaaaaaaaaaaaaaaaaaaaaaaaaaaaaaaaaaaaaaaaaaaaaaaaaaaaaa

SEQ ID NO: 693 - RNA, 1361 nt, Artificial Sequence
  mRNA product Design a-1 (A100) comprising derived and/or modified sequence from RVA/Wa/P[8]__AAA66953.1__P2_VP8*(41-223)_Ferritin (opt1)
aggagagucccgcagucggcguccagcggcucugcuuguucgugugugugucguugcaggccuuauucaagcuuaccaugcaguacaucaaggccaacagcaaguucaucggcaucaccgagcugggguccggcagcggggcccagacccgcuacgcgcccgugaacuggggccacggggagaucaacgacuccacgaccgucgagccgaugcucgacggccccuaccagcccaccaccuucacgcccccgaacgacuacuggauccugaucaacagcaacaccaacggcgugguguacgaguccaccaacaacagcgacuucuggaccgccgucguggccaucgagccccacgugaaccccgucgaccggcaguacacgaucuucggggaguccaagcaguucaacgugagcaacgacuccaacaaguggaaguuccuggagauguuccgcagcuccagccagaacgaguucuacaaccggcgcacccucaccuccgacacccgguucgugggcauccugaaguacgggggccgcgucuggacguuccacggggagacgccccgggccaccaccgacagcuccagcaccgccaaccugaacaacaucuccaucaccauccacagcgaguucuacaucaucccgcgcucccaggagagcaagugcaacgaguacaucaacaacggccucagcggcggggacaucaucaagcugcugaacgagcaggucaacaaggagaugcaguccagcaaccucuacauguccaugagcuccuggugcuacacccacagccuggacggcgcggggcuguuccucuucgaccacgccgccgaggaguacgagcacgccaagaagcugaucaucuuccugaacgagaacaacgugcccgugcagcucaccuccaucagcgcgcccgagcacaaguucgagggccugacgcagaucuuccagaaggccuacgagcacgagcagcacaucuccgagagcaucaacaacaucguggaccacgccaucaaguccaaggaccacgccaccuucaacuuccugcagugguacguggccgagcagcacgaggaggagguccucuucaaggacauccuggacaagaucgagcugaucggcaacgagaaccacgggcucuaccuggcggaccaguacgugaagggcaucgccaagagccggaaguccugaggacuagucccuguucccagagcccacuuuuuuuucuuuuuuugaaauaaaauagccugucuuucagaucuaaaaaaaaaaaaaaaaaaaaaaaaaaaaaaaaaaaaaaaaaaaaaaaaaaaaaaaaaaaaaaaaaaaaaaaaaaaaaaaaaaaaaaaaaaaaaaaaaaaa

SEQ ID NO: 694 - RNA, 1295 nt, Artificial Sequence
  mRNA product Design a-1 (A100) comprising derived and/or modified sequence from RVA/BE1058/P[4]__AEX30665.1__LumSynt_P2_VP8*(65-223) (opt1)
aggagagucccgcagucggcguccagcggcucugcuuguucgugugugugucguugcaggccuuauucaagcuuaccaugcagaucuacgagggcaagcugaccgccgaggggcuccgcuucggcaucguggccagccgguucaaccacgcgcuggucgaccgccugguggagggggccaucgacgccaucgugcggcacggcgggcgcgaggaggacaucacccucguccgggugcccggcuccugggagaucccgguggccgccggcgagcuggcgcgcaaggaggacaucgacgccgucaucgccaucggggugcugauccggggcgccacgccccacuucgacuacaucgcgagcgagguguccaaggggcucgccgaccugagccuggagcuccgcaagcccaucaccuucggcgucaucaccgccgacacccuggagcaggccaucgagcgggccgggacgaagcacggcaacaagggcugggaggcggcccuguccgccaucgagauggccaaccucuucaagagccugcgcgggggcuccgggggcagcggcggguccggcgggagcggcgggggccaguacaucaaggccaacuccaaguucaucggcaucaccgagcuggggagcggcuccgggcucgacggccccuaccagccgaccaccuucaagccgcccaacgacuacuggcugcugaucagcuccaacacggacggggugguguacgagagcaccaacaacuccgacuucuggaccgcggucaucgccguggagccccacgugaaccagaccaaccggcaguacguccucuucggcgagaacaagcaguucaacaucgagaacagcuccgacaaguggaaguucuucgagauguucaagggcaacagccagagcgacuucuccaaccgccggacgcugaccagcuccaaccgccugguggggaugcucaaguacggcgggcggguguggaccuuccacggcgagacgccccgcgccaccaccgacagcuccagcaccgccgaccugaacaacaucuccaucaucauccacagcgaguucuacaucaucccccggucccaggagagcaagugcaacgaguacaucaacaacgggcugugaggacuagucccuguucccagagcccacuuuuuuuucuuuuuuugaaauaaaauagccugucuuucagaucuaaaaaaaaaaaaaaaaaaaaaaaaaaaaaaaaaaaaaaaaaaaaaaaaaaaaaaaaaaaaaaaaaaaaaaaaaaaaaaaaaaaaaaaaaaaaaaaaaaaa

SEQ ID NO: 695 - RNA, 1295 nt, Artificial Sequence
  mRNA product Design a-1 (A100) comprising derived and/or modified sequence from RVA/DS-1/P[4]__CAD62680.1__LumSynt_P2_VP8*(65-223) (opt1)
aggagagucccgcagucggcguccagcggcucugcuuguucgugugugugucguugcaggccuuauucaagcuuaccaugcagaucuacgagggcaagcugaccgccgaggggcuccgcuucggcaucguggccagccgguucaaccacgcgcuggucgaccgccugguggagggggccaucgacgccaucgugcggcacggcgggcgcgaggaggacaucacccucguccgggugcccggcuccugggagaucccgguggccgccggcgagcuggcgcgcaaggaggacaucgacgccgucaucgccaucggggugcugauccggggcgccacgccccacuucgacuacaucgcgagcgagguguccaaggggcucgccgaccugagccuggagcuccgcaagcccaucaccuucggcgucaucaccgccgacacccuggagcaggccaucgagcgggccgggacgaagcacggcaacaagggcugggaggcggcccuguccgccaucgagauggccaaccucuucaagagccugcgcgggggcuccgggggcagcggcggguccggcgggagcggcgggggccaguacaucaaggccaacuccaaguucaucggcaucaccgagcuggggagcggcuccgggcucgacggccccuaccagccgaccaccuucaagccgcccaacgacuacuggcugcugaucagcuccaacacgaacggggugguguacgagagcaccaacaacaacgacuucuggaccgcggucuccagcguggagccccacgugucccagaccaaccggcaguacauccucuucggcgagaacaagcaguucaacgucgagaacaacagcgacaaguggaaguucuucgagacguucaccggcagcucccaggggaacuucagcaaccgccggacccugaccuccagcaaccgccuggugggcaugcucaaguacgggggccggguguggacguuccacggggagacgccccgcgccaccaccgacuccagcaacaccgccgaccugaacaacaucuccaucaucauccacagcgaguucuacaucaucccccggucccaggagagcaagugcaacgaguacaucaacaacggccugugaggacuagucccuguucccagagcccacuuuuuuuucuuuuuuugaaauaaaauagccugucuuucagaucuaaaaaaaaaaaaaaaaaaaaaaaaaaaaaaaaaaaaaaaaaaaaaaaaaaaaaaaaaaaaaaaaaaaaaaaaaaaaaaaaaaaaaaaaaaaaaaaaaaaa

SEQ ID NO: 696 - RNA, 1295 nt, Artificial Sequence; identical to SEQ ID NO: 695
  mRNA product Design a-1 (A100) comprising derived and/or modified sequence from RVA/DS-1/P[4]__ABV53252.1__LumSynt_P2_VP8*(65-223) (opt1)

SEQ ID NO: 697 - RNA, 1295 nt, Artificial Sequence
  mRNA product Design a-1 (A100) comprising derived and/or modified sequence from RVA/F01322/P[6]__AFA51886.1__LumSynt_P2_VP8*(65-223) (opt1)
aggagagucccgcagucggcguccagcggcucugcuuguucgugugugugucguugcaggccuuauucaagcuuaccaugcagaucuacgagggcaagcugaccgccgaggggcuccgcuucggcaucguggccagccgguucaaccacgcgcuggucgaccgccugguggagggggccaucgacgccaucgugcggcacggcgggcgcgaggaggacaucacccucguccgggugcccggcuccugggagaucccgguggccgccggcgagcuggcgcgcaaggaggacaucgacgccgucaucgccaucggggugcugauccggggcgccacgccccacuucgacuacaucgcgagcgagguguccaaggggcucgccgaccugagccuggagcuccgcaagcccaucaccuucggcgucaucaccgccgacacccuggagcaggccaucgagcgggccgggacgaagcacggcaacaagggcugggaggcggcccuguccgccaucgagauggccaaccucuucaagagccugcgcgggggcuccgggggcagcggcggguccggcgggagcggcgggggccaguacaucaaggccaacuccaaguucaucggcaucaccgagcuggggagcggcuccgggcucgacggccccuaccagccgaccaacuucaagccgcccaacgacuacuggauccugcugaaccccaccaaccagcaggucgugcucgaggggacgaacaagaccgacaucuggguggcgcugcugcucguggagcccaacgugaccaaccagagccggcaguacacccuguucggcgagacgaagcagaucaccgucgagaacaacaccaacaaguggaaguucuucgagauguuccgcuccagcguguccgccgaguuccagcacaagcggacccugacgagcgacaccaagcucgccggcuucaugaaguucuacaacuccguguggaccuuccacggggagacccccaacgccacgaccgacuacagcagcaccuccaaccuguucgaggucgagaccgugauccacguggaguucuacaucaucccccgcagccaggaguccaagugcagcgaguacaucaacacgggccugugaggacuagucccuguucccagagcccacuuuuuuuucuuuuuuugaaauaaaauagccugucuuucagaucuaaaaaaaaaaaaaaaaaaaaaaaaaaaaaaaaaaaaaaaaaaaaaaaaaaaaaaaaaaaaaaaaaaaaaaaaaaaaaaaaaaaaaaaaaaaaaaaaaaaa

SEQ ID NO: 698 - RNA, 1295 nt, Artificial Sequence
  mRNA product Design a-1 (A100) comprising derived and/or modified sequence from RVA/1076/P[6]__AAA47337.1__LumSynt_P2_VP8*(65-223) (opt1)
aggagagucccgcagucggcguccagcggcucugcuuguucgugugugugucguugcaggccuuauucaagcuuaccaugcagaucuacgagggcaagcugaccgccgaggggcuccgcuucggcaucguggccagccgguucaaccacgcgcuggucgaccgccugguggagggggccaucgacgccaucgugcggcacggcgggcgcgaggaggacaucacccucguccgggugcccggcuccugggagaucccgguggccgccggcgagcuggcgcgcaaggaggacaucgacgccgucaucgccaucggggugcugauccggggcgccacgccccacuucgacuacaucgcgagcgagguguccaaggggcucgccgaccugagccuggagcuccgcaagcccaucaccuucggcgucaucaccgccgacacccuggagcaggccaucgagcgggccgggacgaagcacggcaacaagggcugggaggcggcccuguccgccaucgagauggccaaccucuucaagagccugcgcgggggcuccgggggcagcggcggguccggcgggagcggcgggggccaguacaucaaggccaacuccaaguucaucggcaucaccgagcuggggagcggcuccgggcucgacggccccuaccagccgaccagcuucaagccgcccuccgacuacuggauccugcugaaccccaccaaccagcaggucgugcucgaggggacgaacaagaccgacaucuggguggcgcugcugcucguggagcccaacgugaccaaccagagccggcaguacacccuguucggcgagacgaagcagaucaccgucgagaacaacaccaacaaguggaaguucuucgagauguuccgcuccagcguguccgccgaguuccagcacaagcggacccugacgagcgacaccaagcucgccggcuuccugaaguucuacaacagcguguggaccuucuacggggagacgccccacgccaccaccgacuacuccagcaccuccaaccugagcgaggucgagaccgccauccacguggaguucuacaucaucccccgcucccaggagagcaagugcaacgaguacaucaacacgggccucugaggacuagucccuguucccagagcccacuuuuuuuucuuuuuuugaaauaaaauagccugucuuucagaucuaaaaaaaaaaaaaaaaaaaaaaaaaaaaaaaaaaaaaaaaaaaaaaaaaaaaaaaaaaaaaaaaaaaaaaaaaaaaaaaaaaaaaaaaaaaaaaaaaaaa

SEQ ID NO: 699 - RNA, 1295 nt, Artificial Sequence
  mRNA product Design a-1 (A100) comprising derived and/or modified sequence from RVA/BE1128/P[8]__AEX30671.1__LumSynt_P2_VP8*(65-223) (opt1)
aggagagucccgcagucggcguccagcggcucugcuuguucgugugugugucguugcaggccuuauucaagcuuaccaugcagaucuacgagggcaagcugaccgccgaggggcuccgcuucggcaucguggccagccgguucaaccacgcgcuggucgaccgccugguggagggggccaucgacgccaucgugcggcacggcgggcgcgaggaggacaucacccucguccgggugcccggcuccugggagaucccgguggccgccggcgagcuggcgcgcaaggaggacaucgacgccgucaucgccaucggggugcugauccggggcgccacgccccacuucgacuacaucgcgagcgagguguccaaggggcucgccgaccugagccuggagcuccgcaagcccaucaccuucggcgucaucaccgccgacacccuggagcaggccaucgagcgggccgggacgaagcacggcaacaagggcugggaggcggcccuguccgccaucgagauggccaaccucuucaagagccugcgcgggggcuccgggggcagcggcggguccggcgggagcggcgggggccaguacaucaaggccaacuccaaguucaucggcaucaccgagcuggggagcggcuccgggcucgacggccccuaccagccgaccaccuucacgccgcccaccgacuacuggauccugaucaccagcaacaccaacggggugguguacgaguccacgaacaacagcgacuucuggaccgcggucaucgccguggagccccacgugaaccccgucgaccggcaguacaacguguucggcgagaacaagcaguucaacgugcgcaacgacuccgacaaguggaaguuccuggagauguuccggggcagcucccagaacgacuucuacaaccgccggacccucaccagcgacacgcgccuggucgggauccugaaguacggcgggcggguguggaccuuccacggcgagacgccccgcgccaccaccgacagcuccaacaccgccaaccucgacgggaucagcaucaccauccacuccgaguucuacaucaucccccggagccaggaguccaagugcaacgaguacaucaacaacggccugugaggacuagucccuguucccagagcccacuuuuuuuucuuuuuuugaaauaaaauagccugucuuucagaucuaaaaaaaaaaaaaaaaaaaaaaaaaaaaaaaaaaaaaaaaaaaaaaaaaaaaaaaaaaaaaaaaaaaaaaaaaaaaaaaaaaaaaaaaaaaaaaaaaaaa

SEQ ID NO: 700 - RNA, 1295 nt, Artificial Sequence
  mRNA product Design a-1 (A100) comprising derived and/or modified sequence from RVA/Wa-VirWa/P[8]__ACR22783.1__LumSynt_P2_VP8*(65-223) (opt1)
aggagagucccgcagucggcguccagcggcucugcuuguucgugugugugucguugcaggccuuauucaagcuuaccaugcagaucuacgagggcaagcugaccgccgaggggcuccgcuucggcaucguggccagccgguucaaccacgcgcuggucgaccgccugguggagggggccaucgacgccaucgugcggcacggcgggcgcgaggaggacaucacccucguccgggugcccggcuccugggagaucccgguggccgccggcgagcuggcgcgcaaggaggacaucgacgccgucaucgccaucggggugcugauccggggcgccacgccccacuucgacuacaucgcgagcgagguguccaaggggcucgccgaccugagccuggagcuccgcaagcccaucaccuucggcgucaucaccgccgacacccuggagcaggccaucgagcgggccgggacgaagcacggcaacaagggcugggaggcggcccuguccgccaucgagauggccaaccucuucaagagccugcgcgggggcuccgggggcagcggcggguccggcgggagcggcgggggccaguacaucaaggccaacuccaaguucaucggcaucaccgagcuggggagcggcuccgggcucgacggccccuaccagccgaccaccuucacgccgcccaacgacuacuggauccugaucaacagcaacaccaacggggugguguacgaguccaccaacaacagcgacuucuggaccgcggucguggccaucgagccccacgugaaccccgucgaccggcaguacacgaucuucggcgaguccaagcaguucaacgugcgcaacgacagcaacaaguggaaguuccuggagauguuccgguccagcagccagaacgaguucuacaaccgccggacccucaccuccgacacccgccuggugggcauccugaaguacgggggccgggucuggacguuccacggggagacgccccgcgccaccaccgacagcuccagcaccgccaaccucaacaacaucuccaucaccauccacagcgaguucuacaucaucccccggucccaggagagcaagugcaacgaguacaucaacaacggccugugaggacuagucccuguucccagagcccacuuuuuuuucuuuuuuugaaauaaaauagccugucuuucagaucuaaaaaaaaaaaaaaaaaaaaaaaaaaaaaaaaaaaaaaaaaaaaaaaaaaaaaaaaaaaaaaaaaaaaaaaaaaaaaaaaaaaaaaaaaaaaaaaaaaaa

SEQ ID NO: 701 - RNA, 1295 nt, Artificial Sequence
  mRNA product Design a-1 (A100) comprising derived and/or modified sequence from RVA/Wa/P[8]__AAA47290.1__LumSynt_P2_VP8*(65-223) (opt1)
aggagagucccgcagucggcguccagcggcucugcuuguucgugugugugucguugcaggccuuauucaagcuuaccaugcagaucuacgagggcaagcugaccgccgaggggcuccgcuucggcaucguggccagccgguucaaccacgcgcuggucgaccgccugguggagggggccaucgacgccaucgugcggcacggcgggcgcgaggaggacaucacccucguccgggugcccggcuccugggagaucccgguggccgccggcgagcuggcgcgcaaggaggacaucgacgccgucaucgccaucggggugcugauccggggcgccacgccccacuucgacuacaucgcgagcgagguguccaaggggcucgccgaccugagccuggagcuccgcaagcccaucaccuucggcgucaucaccgccgacacccuggagcaggccaucgagcgggccgggacgaagcacggcaacaagggcugggaggcggcccuguccgccaucgagauggccaaccucuucaagagccugcgcgggggcuccgggggcagcggcggguccggcgggagcggcgggggccaguacaucaaggccaacuccaaguucaucggcaucaccgagcuggggagcggcuccgggcucgacggccccuaccagccgaccaccuucacgccgcccaacgacuacuggauccugaucaacagcaacaccaacggggugguguacgaguccaccaacaacagcgacuucuggaccgcggucguggccaucgagccccacgugaaccccgucgaccggcaguacacgaucuucggcgaguccaagcaguucaacgugagcaacgacuccaacaaguggaaguuccuggagauguuccgcagcagcucccagaacgaguucuacaaccggcgcacccucaccagcgacacccgguucgugggcauccugaaguacgggggccgcgucuggacguuccacggggagacgccccgggccaccaccgacuccagcuccaccgccaaccugaacaacaucagcaucaccauccacuccgaguucuacaucaucccccgcagccaggaguccaagugcaacgaguacaucaacaacggccucugaggacuagucccuguucccagagcccacuuuuuuuucuuuuuuugaaauaaaauagccugucuuucagaucuaaaaaaaaaaaaaaaaaaaaaaaaaaaaaaaaaaaaaaaaaaaaaaaaaaaaaaaaaaaaaaaaaaaaaaaaaaaaaaaaaaaaaaaaaaaaaaaaaaaa

SEQ ID NO: 702 - RNA, 1295 nt, Artificial Sequence; identical to SEQ ID NO: 701
  mRNA product Design a-1 (A100) comprising derived and/or modified sequence from RVA/Wa/P[8]__AAA66953.1__LumSynt_P2_VP8*(65-223) (opt1)

SEQ ID NO: 703 - RNA, 1367 nt, Artificial Sequence
  mRNA product Design a-1 (A100) comprising derived and/or modified sequence from RVA/BE1058/P[4]__AEX30665.1__LumSynt_P2_VP8*(41-223) (opt1)
aggagagucccgcagucggcguccagcggcucugcuuguucgugugugugucguugcaggccuuauucaagcuuaccaugcagaucuacgagggcaagcugaccgccgaggggcuccgcuucggcaucguggccagccgguucaaccacgcgcuggucgaccgccugguggagggggccaucgacgccaucgugcggcacggcgggcgcgaggaggacaucacccucguccgggugcccggcuccugggagaucccgguggccgccggcgagcuggcgcgcaaggaggacaucgacgccgucaucgccaucggggugcugauccggggcgccacgccccacuucgacuacaucgcgagcgagguguccaaggggcucgccgaccugagccuggagcuccgcaagcccaucaccuucggcgucaucaccgccgacacccuggagcaggccaucgagcgggccgggacgaagcacggcaacaagggcugggaggcggcccuguccgccaucgagauggccaaccucuucaagagccugcgcgggggcuccgggggcagcggcggguccggcgggagcggcgggggccaguacaucaaggccaacuccaaguucaucggcaucaccgagcuggggagcggcuccggggcgcagacccgguacgcccccgugaacuggggccacggggagaucaacgacagcaccacgguggagccgguccucgacggccccuaccagcccaccaccuucaagcccccgaacgacuacuggcugcugaucuccagcaacaccgacggcgugguguacgaguccacgaacaacagcgacuucuggaccgccgucaucgccguggagccccacgugaaccagaccaaccgccaguacguccucuucggggagaacaagcaguucaacaucgagaacuccagcgacaaguggaaguucuucgagauguucaagggcaacagccaguccgacuucagcaaccggcgcacccugacguccagcaaccggcugguggggaugcucaaguacggcgggcgcguguggaccuuccacggcgagacgccccgggccaccaccgacuccagcuccaccgcggaccugaacaacaucagcaucaucauccacuccgaguucuacaucaucccccgcagccaggaguccaagugcaacgaguacaucaacaacggccugugaggacuagucccuguucccagagcccacuuuuuuuucuuuuuuugaaauaaaauagccugucuuucagaucuaaaaaaaaaaaaaaaaaaaaaaaaaaaaaaaaaaaaaaaaaaaaaaaaaaaaaaaaaaaaaaaaaaaaaaaaaaaaaaaaaaaaaaaaaaaaaaaaaaaa

SEQ ID NO: 704 - RNA, 1367 nt, Artificial Sequence
  mRNA product Design a-1 (A100) comprising derived and/or modified sequence from RVA/DS-1/P[4]__CAD62680.1__LumSynt_P2_VP8*(41-223) (opt1)
aggagagucccgcagucggcguccagcggcucugcuuguucgugugugugucguugcaggccuuauucaagcuuaccaugcagaucuacgagggcaagcugaccgccgaggggcuccgcuucggcaucguggccagccgguucaaccacgcgcuggucgaccgccugguggagggggccaucgacgccaucgugcggcacggcgggcgcgaggaggacaucacccucguccgggugcccggcuccugggagaucccgguggccgccggcgagcuggcgcgcaaggaggacaucgacgccgucaucgccaucggggugcugauccggggcgccacgccccacuucgacuacaucgcgagcgagguguccaaggggcucgccgaccugagccuggagcuccgcaagcccaucaccuucggcgucaucaccgccgacacccuggagcaggccaucgagcgggccgggacgaagcacggcaacaagggcugggaggcggcccuguccgccaucgagauggccaaccucuucaagagccugcgcgggggcuccgggggcagcggcggguccggcgggagcggcgggggccaguacaucaaggccaacuccaaguucaucggcaucaccgagcuggggagcggcuccggggcgcagacccgguacgcccccgugaacuggggcagcugggagaucaacgacuccaccacgguggagccgguccucgacgggcccuaccagcccaccaccuucaagcccccgaacgacuacuggcugcugaucagcuccaacaccaacggcgugguguacgagagcacgaacaacaacgacuucuggaccgccgucuccagcguggagccccacgugagccagaccaaccgccaguacauccucuucggcgagaacaagcaguucaacgucgagaacaacuccgacaaguggaaguucuucgagaccuucacggggagcucccagggcaacuucagcaaccggcgcacccugaccuccagcaaccggcugguggggaugcucaaguacggcgggcgcguguggaccuuccacggcgagacgccccgggccaccaccgacuccagcaacaccgccgaccugaacaacaucuccaucaucauccacagcgaguucuacaucaucccccgcucccaggagagcaagugcaacgaguacaucaacaacggccugugaggacuagucccuguucccagagcccacuuuuuuuucuuuuuuugaaauaaaauagccugucuuucagaucuaaaaaaaaaaaaaaaaaaaaaaaaaaaaaaaaaaaaaaaaaaaaaaaaaaaaaaaaaaaaaaaaaaaaaaaaaaaaaaaaaaaaaaaaaaaaaaaaaaaa

SEQ ID NO: 705 - RNA, 1367 nt, Artificial Sequence; identical to SEQ ID NO: 704
  mRNA product Design a-1 (A100) comprising derived and/or modified sequence from RVA/DS-1/P[4]__ABV53252.1__LumSynt_P2_VP8*(41-223) (opt1)

SEQ ID NO: 706 - RNA, 1367 nt, Artificial Sequence
  mRNA product Design a-1 (A100) comprising derived and/or modified sequence from RVA/F01322/P[6]__AFA51886.1__LumSynt_P2_VP8*(41-223) (opt1)
aggagagucccgcagucggcguccagcggcucugcuuguucgugugugugucguugcaggccuuauucaagcuuaccaugcagaucuacgagggcaagcugaccgccgaggggcuccgcuucggcaucguggccagccgguucaaccacgcgcuggucgaccgccugguggagggggccaucgacgccaucgugcggcacggcgggcgcgaggaggacaucacccucguccgggugcccggcuccugggagaucccgguggccgccggcgagcuggcgcgcaaggaggacaucgacgccgucaucgccaucggggugcugauccggggcgccacgccccacuucgacuacaucgcgagcgagguguccaaggggcucgccgaccugagccuggagcuccgcaagcccaucaccuucggcgucaucaccgccgacacccuggagcaggccaucgagcgggccgggacgaagcacggcaacaagggcugggaggcggcccuguccgccaucgagauggccaaccucuucaagagccugcgcgggggcuccgggggcagcggcggguccggcgggagcggcgggggccaguacaucaaggccaacuccaaguucaucggcaucaccgagcuggggagcggcuccggggcgcagaccaacuacgcccccgugaccuggagccacggcgaggugaacgacuccacgaccaucgagccgguccucgacgggcccuaccagcccaccaacuucaagcccccgaacgacuacuggauccugcugaaccccaccaaccagcaggucgugcucgagggcacgaacaagaccgacaucuggguggcccugcugcucguggagcccaacgugaccaaccagagccggcaguacacccuguucggcgagacgaagcagaucaccgucgagaacaacaccaacaaguggaaguucuucgagauguuccgcuccagcguguccgccgaguuccagcacaagcggacccugacgagcgacaccaagcucgccggguucaugaaguucuacaacagcguguggaccuuccacggcgagacccccaacgcgacgaccgacuacuccagcaccuccaaccuguucgaggucgagaccgugauccacguggaguucuacaucaucccgcgcagccaggaguccaagugcagcgaguacaucaacacggggcugugaggacuagucccuguucccagagcccacuuuuuuuucuuuuuuugaaauaaaauagccugucuuucagaucuaaaaaaaaaaaaaaaaaaaaaaaaaaaaaaaaaaaaaaaaaaaaaaaaaaaaaaaaaaaaaaaaaaaaaaaaaaaaaaaaaaaaaaaaaaaaaaaaaaaa

SEQ ID NO: 707 - RNA, 1367 nt, Artificial Sequence
  mRNA product Design a-1 (A100) comprising derived and/or modified sequence from RVA/1076/P[6]__AAA47337.1__LumSynt_P2_VP8*(41-223) (opt1)
aggagagucccgcagucggcguccagcggcucugcuuguucgugugugugucguugcaggccuuauucaagcuuaccaugcagaucuacgagggcaagcugaccgccgaggggcuccgcuucggcaucguggccagccgguucaaccacgcgcuggucgaccgccugguggagggggccaucgacgccaucgugcggcacggcgggcgcgaggaggacaucacccucguccgggugcccggcuccugggagaucccgguggccgccggcgagcuggcgcgcaaggaggacaucgacgccgucaucgccaucggggugcugauccggggcgccacgccccacuucgacuacaucgcgagcgagguguccaaggggcucgccgaccugagccuggagcuccgcaagcccaucaccuucggcgucaucaccgccgacacccuggagcaggccaucgagcgggccgggacgaagcacggcaacaagggcugggaggcggcccuguccgccaucgagauggccaaccucuucaagagccugcgcgggggcuccgggggcagcggcggguccggcgggagcggcgggggccaguacaucaaggccaacuccaaguucaucggcaucaccgagcuggggagcggcuccggggcgcagaccaacuacgcccccgugaccuggagccacggcgaggugaacgacuccacgaccaucgagccgguccucgacgggcccuaccagcccaccagcuucaagcccccguccgacuacuggauccugcugaaccccaccaaccagcaggucgugcucgagggcacgaacaagaccgacaucuggguggcccugcugcucguggagcccaacgugaccaaccagagccggcaguacacccuguucggcgagacgaagcagaucaccgucgagaacaacaccaacaaguggaaguucuucgagauguuccgcuccagcgugagcgccgaguuccagcacaagcggacccugacguccgacaccaagcucgccggguuccugaaguucuacaacagcguguggaccuucuacggcgagacgccccacgcgaccaccgacuacuccagcaccuccaaccugagcgaggucgagaccgccauccacguggaguucuacaucaucccgcgcucccaggagagcaagugcaacgaguacaucaacacggggcucugaggacuagucccuguucccagagcccacuuuuuuuucuuuuuuugaaauaaaauagccugucuuucagaucuaaaaaaaaaaaaaaaaaaaaaaaaaaaaaaaaaaaaaaaaaaaaaaaaaaaaaaaaaaaaaaaaaaaaaaaaaaaaaaaaaaaaaaaaaaaaaaaaaaaa

SEQ ID NO: 708 - RNA, 1367 nt, Artificial Sequence
  mRNA product Design a-1 (A100) comprising derived and/or modified sequence from RVA/BE1128/P[8]__AEX30671.1__LumSynt_P2_VP8*(41-223) (opt1)
aggagagucccgcagucggcguccagcggcucugcuuguucgugugugugucguugcaggccuuauucaagcuuaccaugcagaucuacgagggcaagcugaccgccgaggggcuccgcuucggcaucguggccagccgguucaaccacgcgcuggucgaccgccugguggagggggccaucgacgccaucgugcggcacggcgggcgcgaggaggacaucacccucguccgggugcccggcuccugggagaucccgguggccgccggcgagcuggcgcgcaaggaggacaucgacgccgucaucgccaucggggugcugauccggggcgccacgccccacuucgacuacaucgcgagcgagguguccaaggggcucgccgaccugagccuggagcuccgcaagcccaucaccuucggcgucaucaccgccgacacccuggagcaggccaucgagcgggccgggacgaagcacggcaacaagggcugggaggcggcccuguccgccaucgagauggccaaccucuucaagagccugcgcgggggcuccgggggcagcggcggguccggcgggagcggcgggggccaguacaucaaggccaacuccaaguucaucggcaucaccgagcuggggagcggcuccggggcgcagacccgguacgcccccgugaacuggggccacggggagaucaacgacagcaccacgguggagccgauccucgacggccccuaccagcccaccaccuucacgcccccgaccgacuacuggauccugaucaccuccaacaccaacggcgucguguacgagagcaccaacaacuccgacuucuggacggccgugaucgccgucgagccccacgugaaccccguggaccgccaguacaacgucuucggggagaacaagcaguucaacgugcggaacgacagcgacaaguggaaguuccuggagauguuccgcggcuccagccagaacgacuucuacaaccggcgcacccucaccagcgacacccggcugguggggauccugaaguacggcgggcgcgucuggacguuccacggcgagacgccccgggccaccaccgacuccagcaacaccgcgaaccucgacggcaucuccaucaccauccacagcgaguucuacaucaucccgcgcucccaggagagcaagugcaacgaguacaucaacaacgggcugugaggacuagucccuguucccagagcccacuuuuuuuucuuuuuuugaaauaaaauagccugucuuucagaucuaaaaaaaaaaaaaaaaaaaaaaaaaaaaaaaaaaaaaaaaaaaaaaaaaaaaaaaaaaaaaaaaaaaaaaaaaaaaaaaaaaaaaaaaaaaaaaaaaaaa

SEQ ID NO: 709 - RNA, 1367 nt, Artificial Sequence
  mRNA product Design a-1 (A100) comprising derived and/or modified sequence from RVA/Wa-VirWa/P[8]__ACR22783.1__LumSynt_P2_VP8*(41-223) (opt1)
aggagagucccgcagucggcguccagcggcucugcuuguucgugugugugucguugcaggccuuauucaagcuuaccaugcagaucuacgagggcaagcugaccgccgaggggcuccgcuucggcaucguggccagccgguucaaccacgcgcuggucgaccgccugguggagggggccaucgacgccaucgugcggcacggcgggcgcgaggaggacaucacccucguccgggugcccggcuccugggagaucccgguggccgccggcgagcuggcgcgcaaggaggacaucgacgccgucaucgccaucggggugcugauccggggcgccacgccccacuucgacuacaucgcgagcgagguguccaaggggcucgccgaccugagccuggagcuccgcaagcccaucaccuucggcgucaucaccgccgacacccuggagcaggccaucgagcgggccgggacgaagcacggcaacaagggcugggaggcggcccuguccgccaucgagauggccaaccucuucaagagccugcgcgggggcuccgggggcagcggcggguccggcgggagcggcgggggccaguacaucaaggccaacuccaaguucaucggcaucaccgagcuggggagcggcuccggggcgcagacccgguacgcccccgugaacuggggccacggggagaucaacgacagcaccacgguggagccgauccucgacggccccuaccagcccaccaccuucacgcccccgaacgacuacuggauccugaucaacuccaacaccaacggcgucguguacgagagcaccaacaacuccgacuucuggaccgccguggucgccaucgagccccacgugaaccccguggaccgccaguacaccaucuucggggagagcaagcaguucaacguccggaacgacuccaacaaguggaaguuccuggagauguuccgcagcagcucccagaacgaguucuacaaccggcgcacgcucaccagcgacacccggcuggugggcauccugaaguacgggggccgcguguggaccuuccacggggagacgccccgggccaccaccgacuccagcuccaccgcgaaccucaacaacaucagcaucacgauccacuccgaguucuacaucaucccgcgcagccaggaguccaagugcaacgaguacaucaacaacggccugugaggacuagucccuguucccagagcccacuuuuuuuucuuuuuuugaaauaaaauagccugucuuucagaucuaaaaaaaaaaaaaaaaaaaaaaaaaaaaaaaaaaaaaaaaaaaaaaaaaaaaaaaaaaaaaaaaaaaaaaaaaaaaaaaaaaaaaaaaaaaaaaaaaaaa

SEQ ID NO: 710 - RNA, 1367 nt, Artificial Sequence
  mRNA product Design a-1 (A100) comprising derived and/or modified sequence from RVA/Wa/P[8]__AAA47290.1__LumSynt_P2_VP8*(41-223) (opt1)
aggagagucccgcagucggcguccagcggcucugcuuguucgugugugugucguugcaggccuuauucaagcuuaccaugcagaucuacgagggcaagcugaccgccgaggggcuccgcuucggcaucguggccagccgguucaaccacgcgcuggucgaccgccugguggagggggccaucgacgccaucgugcggcacggcgggcgcgaggaggacaucacccucguccgggugcccggcuccugggagaucccgguggccgccggcgagcuggcgcgcaaggaggacaucgacgccgucaucgccaucggggugcugauccggggcgccacgccccacuucgacuacaucgcgagcgagguguccaaggggcucgccgaccugagccuggagcuccgcaagcccaucaccuucggcgucaucaccgccgacacccuggagcaggccaucgagcgggccgggacgaagcacggcaacaagggcugggaggcggcccuguccgccaucgagauggccaaccucuucaagagccugcgcgggggcuccgggggcagcggcggguccggcgggagcggcgggggccaguacaucaaggccaacuccaaguucaucggcaucaccgagcuggggagcggcuccggggcgcagacccgguacgcccccgugaacuggggccacggggagaucaacgacagcaccacgguggagccgauccucgacggccccuaccagcccaccaccuucacgcccccgaacgacuacuggauccugaucaacuccaacaccaacggcgucguguacgagagcaccaacaacuccgacuucuggaccgccguggucgccaucgagccccacgugaaccccguggaccgccaguacaccaucuucggggagagcaagcaguucaacgucuccaacgacagcaacaaguggaaguuccuggagauguuccggagcuccagccagaacgaguucuacaaccgccggacgcucaccuccgacacccgcuucgugggcauccugaaguacgggggccggguguggaccuuccacggggagacgccccgcgccaccaccgacagcuccagcaccgcgaaccugaacaacaucuccaucacgauccacagcgaguucuacaucaucccgcggucccaggagagcaagugcaacgaguacaucaacaacggccucugaggacuagucccuguucccagagcccacuuuuuuuucuuuuuuugaaauaaaauagccugucuuucagaucuaaaaaaaaaaaaaaaaaaaaaaaaaaaaaaaaaaaaaaaaaaaaaaaaaaaaaaaaaaaaaaaaaaaaaaaaaaaaaaaaaaaaaaaaaaaaaaaaaaaa

SEQ ID NO: 711 - RNA, 1367 nt, Artificial Sequence
  mRNA product Design a-1 (A100) comprising derived and/or modified sequence from RVA/Wa/P[8]__AAA66953.1__LumSynt_P2_VP8*(41-223) (opt1)
aggagagucccgcagucggcguccagcggcucugcuuguucgugugugugucguugcaggccuuauucaagcuuaccaugcagaucuacgagggcaagcugaccgccgaggggcuccgcuucggcaucguggccagccgguucaaccacgcgcuggucgaccgccugguggagggggccaucgacgccaucgugcggcacggcgggcgcgaggaggacaucacccucguccgggugcccggcuccugggagaucccgguggccgccggcgagcuggcgcgcaaggaggacaucgacgccgucaucgccaucggggugcugauccggggcgccacgccccacuucgacuacaucgcgagcgagguguccaaggggcucgccgaccugagccuggagcuccgcaagcccaucaccuucggcgucaucaccgccgacacccuggagcaggccaucgagcgggccgggacgaagcacggcaacaagggcugggaggcggcccuguccgccaucgagauggccaaccucuucaagagccugcgcgggggcuccgggggcagcggcggguccggcgggagcggcgggggccaguacaucaaggccaacuccaaguucaucggcaucaccgagcuggggagcggcuccggggcgcagacccgguacgcccccgugaacuggggccacggggagaucaacgacagcaccacgguggagccgaugcucgacggccccuaccagcccaccaccuucacgcccccgaacgacuacuggauccugaucaacuccaacaccaacggcgucguguacgagagcaccaacaacuccgacuucuggaccgccguggucgccaucgagccccacgugaaccccguggaccgccaguacaccaucuucggggagagcaagcaguucaacgucuccaacgacagcaacaaguggaaguuccuggagauguuccggagcuccagccagaacgaguucuacaaccgccggacgcucaccuccgacacccgcuucgugggcauccugaaguacgggggccggguguggaccuuccacggggagacgccccgcgccaccaccgacagcuccagcaccgcgaaccugaacaacaucuccaucacgauccacagcgaguucuacaucaucccgcggucccaggagagcaagugcaacgaguacaucaacaacggccucugaggacuagucccuguucccagagcccacuuuuuuuucuuuuuuugaaauaaaauagccugucuuucagaucuaaaaaaaaaaaaaaaaaaaaaaaaaaaaaaaaaaaaaaaaaaaaaaaaaaaaaaaaaaaaaaaaaaaaaaaaaaaaaaaaaaaaaaaaaaaaaaaaaaaa

SEQ ID NO: 712 - RNA, 842 nt, Artificial Sequence
  mRNA product Design a-1 (A100) comprising derived and/or modified sequence from RVA/BE1058/P[4]__AEX30665.1__SP-IgE_P2_VP8*(65-223) (opt1)
aggagagucccgcagucggcguccagcggcucugcuuguucgugugugugucguugcaggccuuauucaagcuuaccauggacuggaccuggauccuguuccucguggccgccgcgacccgcguccacagccaguacaucaaggccaacuccaaguucaucggcaucacggagcuggggagcggcuccgggcuggacggccccuaccagccgaccaccuucaagccgcccaacgacuacuggcuccugaucagcuccaacaccgacggggugguguacgagagcacgaacaacuccgacuucuggaccgccgucaucgccguggagccccacgugaaccagaccaaccggcaguacguccuguucggcgagaacaagcaguucaacaucgagaacagcuccgacaaguggaaguucuucgagauguucaagggcaacagccaguccgacuucagcaaccgccggacccucacguccagcaaccgccugguggggaugcugaaguacggcgggcggguguggaccuuccacggcgagacgccccgcgccaccaccgacuccagcuccaccgcggaccucaacaacaucagcaucaucauccacuccgaguucuacaucaucccccggagccaggagagcaagugcaacgaguacaucaacaacgggcugugaggacuagucccuguucccagagcccacuuuuuuuucuuuuuuugaaauaaaauagccugucuuucagaucuaaaaaaaaaaaaaaaaaaaaaaaaaaaaaaaaaaaaaaaaaaaaaaaaaaaaaaaaaaaaaaaaaaaaaaaaaaaaaaaaaaaaaaaaaaaaaaaaaaaa

SEQ ID NO: 713 - RNA, 842 nt, Artificial Sequence
  mRNA product Design a-1 (A100) comprising derived and/or modified sequence from RVA/DS-1/P[4]__CAD62680.1__SP-IgE_P2_VP8*(65-223) (opt1)
aggagagucccgcagucggcguccagcggcucugcuuguucgugugugugucguugcaggccuuauucaagcuuaccauggacuggaccuggauccuguuccucguggccgccgcgacccgcguccacagccaguacaucaaggccaacuccaaguucaucggcaucacggagcuggggagcggcuccgggcuggacggccccuaccagccgaccaccuucaagccgcccaacgacuacuggcuccugaucagcuccaacaccaacggggugguguacgagagcacgaacaacaacgacuucuggaccgccgucuccagcguggagccccacgugucccagaccaaccggcaguacauccuguucggcgagaacaagcaguucaacgucgagaacaacagcgacaaguggaaguucuucgagaccuucacgggcuccagccaggggaacuucuccaaccgccggacccucaccagcuccaaccgccuggugggcaugcugaaguacgggggccggguguggaccuuccacggggagacgccccgcgccaccaccgacagcuccaacaccgccgaccucaacaacaucagcaucaucauccacuccgaguucuacaucaucccccggagccaggagagcaagugcaacgaguacaucaacaacggccugugaggacuagucccuguucccagagcccacuuuuuuuucuuuuuuugaaauaaaauagccugucuuucagaucuaaaaaaaaaaaaaaaaaaaaaaaaaaaaaaaaaaaaaaaaaaaaaaaaaaaaaaaaaaaaaaaaaaaaaaaaaaaaaaaaaaaaaaaaaaaaaaaaaaaa

SEQ ID NO: 714 - RNA, 842 nt, Artificial Sequence; identical to SEQ ID NO: 713
  mRNA product Design a-1 (A100) comprising derived and/or modified sequence from RVA/DS-1/P[4]__ABV53252.1__SP-IgE_P2_VP8*(65-223) (opt1)

SEQ ID NO: 715 - RNA, 842 nt, Artificial Sequence
  mRNA product Design a-1 (A100) comprising derived and/or modified sequence from RVA/F01322/P[6]__AFA51886.1__SP-IgE_P2_VP8*(65-223) (opt1)
aggagagucccgcagucggcguccagcggcucugcuuguucgugugugugucguugcaggccuuauucaagcuuaccauggacuggaccuggauccuguuccucguggccgccgcgacccgcguccacagccaguacaucaaggccaacuccaaguucaucggcaucacggagcuggggagcggcuccgggcuggacggccccuaccagccgaccaacuucaagccgcccaacgacuacuggauccuccugaaccccaccaaccagcaggucgugcuggaggggaccaacaagacggacaucuggguggcccuccugcugguggagcccaacgugaccaaccagagccggcaguacacccucuucggcgagaccaagcagaucacggucgagaacaacaccaacaaguggaaguucuucgagauguuccgcuccagcguguccgccgaguuccagcacaagcggacccugaccagcgacacgaagcuggccggcuucaugaaguucuacaacuccguguggaccuuccacggggagacccccaacgcgaccacggacuacagcuccaccagcaaccucuucgaggucgagaccgugauccacguggaguucuacaucaucccccgcucccaggagagcaagugcuccgaguacaucaacaccggccugugaggacuagucccuguucccagagcccacuuuuuuuucuuuuuuugaaauaaaauagccugucuuucagaucuaaaaaaaaaaaaaaaaaaaaaaaaaaaaaaaaaaaaaaaaaaaaaaaaaaaaaaaaaaaaaaaaaaaaaaaaaaaaaaaaaaaaaaaaaaaaaaaaaaaa

SEQ ID NO: 716 - RNA, 842 nt, Artificial Sequence
  mRNA product Design a-1 (A100) comprising derived and/or modified sequence from RVA/1076/P[6]__AAA47337.1__SP-IgE_P2_VP8*(65-223) (opt1)
aggagagucccgcagucggcguccagcggcucugcuuguucgugugugugucguugcaggccuuauucaagcuuaccauggacuggaccuggauccuguuccucguggccgccgcgacccgcguccacagccaguacaucaaggccaacuccaaguucaucggcaucacggagcuggggagcggcuccgggcuggacggccccuaccagccgaccagcuucaagccgcccuccgacuacuggauccuccugaaccccaccaaccagcaggucgugcuggaggggaccaacaagacggacaucuggguggcccuccugcugguggagcccaacgugaccaaccagagccggcaguacacccucuucggcgagaccaagcagaucacggucgagaacaacaccaacaaguggaaguucuucgagauguuccgcuccagcguguccgccgaguuccagcacaagcggacccugaccagcgacacgaagcuggccggcuuccucaaguucuacaacuccguguggaccuucuacggggagacgccccacgcgaccaccgacuacagcuccaccagcaaccuguccgaggucgagaccgccauccacguggaguucuacaucaucccccgcagccaggaguccaagugcaacgaguacaucaacaccggccugugaggacuagucccuguucccagagcccacuuuuuuuucuuuuuuugaaauaaaauagccugucuuucagaucuaaaaaaaaaaaaaaaaaaaaaaaaaaaaaaaaaaaaaaaaaaaaaaaaaaaaaaaaaaaaaaaaaaaaaaaaaaaaaaaaaaaaaaaaaaaaaaaaaaaa

SEQ ID NO: 717 - RNA, 842 nt, Artificial Sequence
  mRNA product Design a-1 (A100) comprising derived and/or modified sequence from RVA/BE1128/P[8]__AEX30671.1__SP-IgE_P2_VP8*(65-223) (opt1)
aggagagucccgcagucggcguccagcggcucugcuuguucgugugugugucguugcaggccuuauucaagcuuaccauggacuggaccuggauccuguuccucguggccgccgcgacccgcguccacagccaguacaucaaggccaacuccaaguucaucggcaucacggagcuggggagcggcuccgggcuggacggccccuaccagccgaccaccuucaccccgcccacggacuacuggauccucaucaccagcaacaccaacggggugguguacgaguccaccaacaacagcgacuucuggacggccgucaucgccguggagccccacgugaaccccgucgaccggcaguacaacguguucggcgagaacaagcaguucaacgugcgcaacgacuccgacaaguggaaguuccuggagauguuccggggcagcucccagaacgacuucuacaaccgccggacccugaccagcgacacccgccucgucgggauccugaaguacggcgggcggguguggacguuccacggcgagacgccccgcgccaccaccgacuccagcaacaccgcgaaccuggacgggaucuccaucaccauccacagcgaguucuacaucaucccccggucccaggagagcaagugcaacgaguacaucaacaacggccucugaggacuagucccuguucccagagcccacuuuuuuuucuuuuuuugaaauaaaauagccugucuuucagaucuaaaaaaaaaaaaaaaaaaaaaaaaaaaaaaaaaaaaaaaaaaaaaaaaaaaaaaaaaaaaaaaaaaaaaaaaaaaaaaaaaaaaaaaaaaaaaaaaaaaa

SEQ ID NO: 718 - RNA, 842 nt, Artificial Sequence
  mRNA product Design a-1 (A100) comprising derived and/or modified sequence from RVA/Wa-VirWa/P[8]__ACR22783.1__SP-IgE_P2_VP8*(65-223) (opt1)
aggagagucccgcagucggcguccagcggcucugcuuguucgugugugugucguugcaggccuuauucaagcuuaccauggacuggaccuggauccuguuccucguggccgccgcgacccgcguccacagccaguacaucaaggccaacuccaaguucaucggcaucacggagcuggggagcggcuccgggcuggacggccccuaccagccgaccaccuucaccccgcccaacgacuacuggauccucaucaacagcaacacgaacggggugguguacgaguccaccaacaacagcgacuucuggaccgccgucguggccaucgagccccacgugaaccccgucgaccggcaguacaccaucuucggcgaguccaagcaguucaacgugcgcaacgacagcaacaaguggaaguuccuggagauguuccgguccagcucccagaacgaguucuacaaccgccggacgcugaccagcgacacccgccucgugggcauccugaaguacgggggccgggucuggaccuuccacggggagacgccccgcgccaccaccgacuccagcuccaccgcgaaccugaacaacaucagcaucacgauccacuccgaguucuacaucaucccccggagccaggaguccaagugcaacgaguacaucaacaacggccucugaggacuagucccuguucccagagcccacuuuuuuuucuuuuuuugaaauaaaauagccugucuuucagaucuaaaaaaaaaaaaaaaaaaaaaaaaaaaaaaaaaaaaaaaaaaaaaaaaaaaaaaaaaaaaaaaaaaaaaaaaaaaaaaaaaaaaaaaaaaaaaaaaaaaa

SEQ ID NO: 719 - RNA, 842 nt, Artificial Sequence
  mRNA product Design a-1 (A100) comprising derived and/or modified sequence from RVA/Wa/P[8]__AAA47290.1__SP-IgE_P2_VP8*(65-223) (opt1)
aggagagucccgcagucggcguccagcggcucugcuuguucgugugugugucguugcaggccuuauucaagcuuaccauggacuggaccuggauccuguuccucguggccgccgcgacccgcguccacagccaguacaucaaggccaacuccaaguucaucggcaucacggagcuggggagcggcuccgggcuggacggccccuaccagccgaccaccuucaccccgcccaacgacuacuggauccucaucaacagcaacacgaacggggugguguacgaguccaccaacaacagcgacuucuggaccgccgucguggccaucgagccccacgugaaccccgucgaccggcaguacaccaucuucggcgaguccaagcaguucaacgugagcaacgacuccaacaaguggaaguuccuggagauguuccgcagcuccagccagaacgaguucuacaaccggcgcacgcugaccuccgacacccgguucgugggcauccucaaguacgggggccgcgucuggaccuuccacggggagacgccccgggccaccaccgacagcuccagcaccgcgaaccugaacaacaucuccaucacgauccacagcgaguucuacaucaucccccgcucccaggagagcaagugcaacgaguacaucaacaacggccugugaggacuagucccuguucccagagcccacuuuuuuuucuuuuuuugaaauaaaauagccugucuuucagaucuaaaaaaaaaaaaaaaaaaaaaaaaaaaaaaaaaaaaaaaaaaaaaaaaaaaaaaaaaaaaaaaaaaaaaaaaaaaaaaaaaaaaaaaaaaaaaaaaaaaa

SEQ ID NO: 720 - RNA, 842 nt, Artificial Sequence; identical to SEQ ID NO: 719
  mRNA product Design a-1 (A100) comprising derived and/or modified sequence from RVA/Wa/P[8]__AAA66953.1__SP-IgE_P2_VP8*(65-223) (opt1)

SEQ ID NO: 721 - RNA, 914 nt, Artificial Sequence
  mRNA product Design a-1 (A100) comprising derived and/or modified sequence from RVA/BE1058/P[4]__AEX30665.1__SP-IgE_P2_VP8*(41-223) (opt1)
aggagagucccgcagucggcguccagcggcucugcuuguucgugugugugucguugcaggccuuauucaagcuuaccauggacuggaccuggauccuguuccucguggccgccgcgacccgcguccacagccaguacaucaaggccaacuccaaguucaucggcaucacggagcuggggagcggcuccggggcccagacccgguacgcccccgugaacuggggccacggggagaucaacgacagcaccaccguggagccgguccuggacggccccuaccagcccacgaccuucaagcccccgaacgacuacuggcuccugaucuccagcaacaccgacggcgugguguacgaguccaccaacaacagcgacuucuggacggccgucaucgcgguggagccccacgugaaccagaccaaccgccaguacguccuguucggggagaacaagcaguucaacaucgagaacuccagcgacaaguggaaguucuucgagauguucaagggcaacucccagagcgacuucuccaaccggcgcacccucaccagcuccaaccggcugguggggaugcugaaguacggcgggcgcguguggacguuccacggcgagacgccccgggccaccaccgacagcuccagcaccgccgaccucaacaacaucuccaucaucauccacagcgaguucuacaucaucccccgcagccaggaguccaagugcaacgaguacaucaacaacggccugugaggacuagucccuguucccagagcccacuuuuuuuucuuuuuuugaaauaaaauagccugucuuucagaucuaaaaaaaaaaaaaaaaaaaaaaaaaaaaaaaaaaaaaaaaaaaaaaaaaaaaaaaaaaaaaaaaaaaaaaaaaaaaaaaaaaaaaaaaaaaaaaaaaaaa

SEQ ID NO: 722 - RNA, 914 nt, Artificial Sequence
  mRNA product Design a-1 (A100) comprising derived and/or modified sequence from RVA/DS-1/P[4]__CAD62680.1__SP-IgE_P2_VP8*(41-223) (opt1)
aggagagucccgcagucggcguccagcggcucugcuuguucgugugugugucguugcaggccuuauucaagcuuaccauggacuggaccuggauccuguuccucguggccgccgcgacccgcguccacagccaguacaucaaggccaacuccaaguucaucggcaucacggagcuggggagcggcuccggggcccagacccgguacgcccccgugaacuggggcagcugggagaucaacgacuccaccaccguggagccgguccuggacgggcccuaccagcccacgaccuucaagcccccgaacgacuacuggcuccugaucagcuccaacaccaacggcgugguguacgagagcaccaacaacaacgacuucuggacggccgucuccagcguggagccccacgugucccagaccaaccgccaguacauccuguucggcgagaacaagcaguucaacgucgagaacaacagcgacaaguggaaguucuucgagaccuucaccggguccagccagggcaacuucuccaaccggcgcacgcucaccagcuccaaccggcugguggggaugcugaaguacggcgggcgcguguggaccuuccacggcgagacgccccgggcgaccaccgacagcuccaacaccgccgaccucaacaacaucagcaucaucauccacagcgaguucuacaucaucccccgcucccaggagagcaagugcaacgaguacaucaacaacggccugugaggacuagucccuguucccagagcccacuuuuuuuucuuuuuuugaaauaaaauagccugucuuucagaucuaaaaaaaaaaaaaaaaaaaaaaaaaaaaaaaaaaaaaaaaaaaaaaaaaaaaaaaaaaaaaaaaaaaaaaaaaaaaaaaaaaaaaaaaaaaaaaaaaaaa

SEQ ID NO: 723 - RNA, 914 nt, Artificial Sequence; identical to SEQ ID NO: 722
  mRNA product Design a-1 (A100) comprising derived and/or modified sequence from RVA/DS-1/P[4]__ABV53252.1__SP-IgE_P2_VP8*(41-223) (opt1)

SEQ ID NO: 724 - RNA, 914 nt, Artificial Sequence
  mRNA product Design a-1 (A100) comprising derived and/or modified sequence from RVA/F01322/P[6]__AFA51886.1__SP-IgE_P2_VP8*(41-223) (opt1)
aggagagucccgcagucggcguccagcggcucugcuuguucgugugugugucguugcaggccuuauucaagcuuaccauggacuggaccuggauccuguuccucguggccgccgcgacccgcguccacagccaguacaucaaggccaacuccaaguucaucggcaucacggagcuggggagcggcuccggggcccagaccaacuacgcccccgugaccuggagccacggcgaggugaacgacuccaccacgaucgagccgguccuggacgggcccuaccagcccaccaacuucaagcccccgaacgacuacuggauccuccugaaccccaccaaccagcaggucgugcuggagggcaccaacaagacggacaucuggguggcccuccugcugguggagcccaacgugaccaaccagagccggcaguacacccucuucggcgagaccaagcagaucacggucgagaacaacaccaacaaguggaaguucuucgagauguuccgcuccagcguguccgcggaguuccagcacaagcggacccugaccagcgacacgaagcuggccggguucaugaaguucuacaacuccguguggaccuuccacggcgagacccccaacgccaccacggacuacagcuccaccagcaaccucuucgaggucgagaccgugauccacguggaguucuacaucaucccgcgcucccaggagagcaagugcuccgaguacaucaacaccgggcugugaggacuagucccuguucccagagcccacuuuuuuuucuuuuuuugaaauaaaauagccugucuuucagaucuaaaaaaaaaaaaaaaaaaaaaaaaaaaaaaaaaaaaaaaaaaaaaaaaaaaaaaaaaaaaaaaaaaaaaaaaaaaaaaaaaaaaaaaaaaaaaaaaaaaa

SEQ ID NO: 725 - RNA, 914 nt, Artificial Sequence
  mRNA product Design a-1 (A100) comprising derived and/or modified sequence from RVA/1076/P[6]__AAA47337.1__SP-IgE_P2_VP8*(41-223) (opt1)
aggagagucccgcagucggcguccagcggcucugcuuguucgugugugugucguugcaggccuuauucaagcuuaccauggacuggaccuggauccuguuccucguggccgccgcgacccgcguccacagccaguacaucaaggccaacuccaaguucaucggcaucacggagcuggggagcggcuccggggcccagaccaacuacgcccccgugaccuggagccacggcgaggugaacgacuccaccacgaucgagccgguccuggacgggcccuaccagcccaccagcuucaagcccccguccgacuacuggauccuccugaaccccaccaaccagcaggucgugcuggagggcaccaacaagacggacaucuggguggcccuccugcugguggagcccaacgugaccaaccagagccggcaguacacccucuucggcgagaccaagcagaucacggucgagaacaacaccaacaaguggaaguucuucgagauguuccgcuccagcguguccgcggaguuccagcacaagcggacccugaccagcgacacgaagcuggccggguuccucaaguucuacaacuccguguggaccuucuacggcgagacgccccacgccaccaccgacuacagcuccaccagcaaccuguccgaggucgagaccgccauccacguggaguucuacaucaucccgcgcagccaggaguccaagugcaacgaguacaucaacaccgggcugugaggacuagucccuguucccagagcccacuuuuuuuucuuuuuuugaaauaaaauagccugucuuucagaucuaaaaaaaaaaaaaaaaaaaaaaaaaaaaaaaaaaaaaaaaaaaaaaaaaaaaaaaaaaaaaaaaaaaaaaaaaaaaaaaaaaaaaaaaaaaaaaaaaaaa

SEQ ID NO: 726 - RNA, 914 nt, Artificial Sequence
  mRNA product Design a-1 (A100) comprising derived and/or modified sequence from RVA/BE1128/P[8]__AEX30671.1__SP-IgE_P2_VP8*(41-223) (opt1)
aggagagucccgcagucggcguccagcggcucugcuuguucgugugugugucguugcaggccuuauucaagcuuaccauggacuggaccuggauccuguuccucguggccgccgcgacccgcguccacagccaguacaucaaggccaacuccaaguucaucggcaucacggagcuggggagcggcuccggggcccagacccgguacgcccccgugaacuggggccacggggagaucaacgacagcaccaccguggagccgauccuggacggccccuaccagcccacgaccuucacgcccccgaccgacuacuggauccucaucaccuccaacaccaacggcgucguguacgagagcaccaacaacuccgacuucuggaccgccgugaucgcggucgagccccacgugaaccccguggaccgccaguacaacgucuucggggagaacaagcaguucaacgugcggaacgacagcgacaaguggaaguuccuggagauguuccgcggcuccagccagaacgacuucuacaaccggcgcacgcugaccuccgacacccggcucguggggauccugaaguacggcgggcgcgucuggaccuuccacggcgagacgccccgggccaccaccgacagcuccaacaccgccaaccuggacggcaucagcaucacgauccacuccgaguucuacaucaucccgcgcagccaggaguccaagugcaacgaguacaucaacaacgggcucugaggacuagucccuguucccagagcccacuuuuuuuucuuuuuuugaaauaaaauagccugucuuucagaucuaaaaaaaaaaaaaaaaaaaaaaaaaaaaaaaaaaaaaaaaaaaaaaaaaaaaaaaaaaaaaaaaaaaaaaaaaaaaaaaaaaaaaaaaaaaaaaaaaaaa

SEQ ID NO: 727 - RNA, 914 nt, Artificial Sequence
  mRNA product Design a-1 (A100) comprising derived and/or modified sequence from RVA/Wa-VirWa/P[8]__ACR22783.1__SP-IgE_P2_VP8*(41-223) (opt1)
aggagagucccgcagucggcguccagcggcucugcuuguucgugugugugucguugcaggccuuauucaagcuuaccauggacuggaccuggauccuguuccucguggccgccgcgacccgcguccacagccaguacaucaaggccaacuccaaguucaucggcaucacggagcuggggagcggcuccggggcccagacccgguacgcccccgugaacuggggccacggggagaucaacgacagcaccaccguggagccgauccuggacggccccuaccagcccacgaccuucacgcccccgaacgacuacuggauccucaucaacuccaacaccaacggcgucguguacgagagcaccaacaacuccgacuucuggaccgccguggucgcgaucgagccccacgugaaccccguggaccgccaguacaccaucuucggggagagcaagcaguucaacguccggaacgacuccaacaaguggaaguuccuggagauguuccgcagcuccagccagaacgaguucuacaaccggcgcacccugacguccgacacccggcucgugggcauccugaaguacgggggccgcguguggaccuuccacggggagacgccccgggccaccaccgacagcuccagcaccgccaaccugaacaacaucuccaucaccauccacagcgaguucuacaucaucccgcgcucccaggagagcaagugcaacgaguacaucaacaacggccucugaggacuagucccuguucccagagcccacuuuuuuuucuuuuuuugaaauaaaauagccugucuuucagaucuaaaaaaaaaaaaaaaaaaaaaaaaaaaaaaaaaaaaaaaaaaaaaaaaaaaaaaaaaaaaaaaaaaaaaaaaaaaaaaaaaaaaaaaaaaaaaaaaaaaa

SEQ ID NO: 728 - RNA, 914 nt, Artificial Sequence
  mRNA product Design a-1 (A100) comprising derived and/or modified sequence from RVA/Wa/P[8]__AAA47290.1__SP-IgE_P2_VP8*(41-223) (opt1)
aggagagucccgcagucggcguccagcggcucugcuuguucgugugugugucguugcaggccuuauucaagcuuaccauggacuggaccuggauccuguuccucguggccgccgcgacccgcguccacagccaguacaucaaggccaacuccaaguucaucggcaucacggagcuggggagcggcuccggggcccagacccgguacgcccccgugaacuggggccacggggagaucaacgacagcaccaccguggagccgauccuggacggccccuaccagcccacgaccuucacgcccccgaacgacuacuggauccucaucaacuccaacaccaacggcgucguguacgagagcaccaacaacuccgacuucuggaccgccguggucgcgaucgagccccacgugaaccccguggaccgccaguacaccaucuucggggagagcaagcaguucaacgucuccaacgacagcaacaaguggaaguuccuggagauguuccgguccagcucccagaacgaguucuacaaccgccggacccugacgagcgacacccgcuucgugggcauccucaaguacgggggccggguguggaccuuccacggggagacgccccgcgccaccaccgacuccagcuccaccgccaaccugaacaacaucagcaucaccauccacuccgaguucuacaucaucccgcggagccaggagagcaagugcaacgaguacaucaacaacggccugugaggacuagucccuguucccagagcccacuuuuuuuucuuuuuuugaaauaaaauagccugucuuucagaucuaaaaaaaaaaaaaaaaaaaaaaaaaaaaaaaaaaaaaaaaaaaaaaaaaaaaaaaaaaaaaaaaaaaaaaaaaaaaaaaaaaaaaaaaaaaaaaaaaaaa

SEQ ID NO: 729 - RNA, 914 nt, Artificial Sequence
  mRNA product Design a-1 (A100) comprising derived and/or modified sequence from RVA/Wa/P[8]__AAA66953.1__SP-IgE_P2_VP8*(41-223) (opt1)
aggagagucccgcagucggcguccagcggcucugcuuguucgugugugugucguugcaggccuuauucaagcuuaccauggacuggaccuggauccuguuccucguggccgccgcgacccgcguccacagccaguacaucaaggccaacuccaaguucaucggcaucacggagcuggggagcggcuccggggcccagacccgguacgcccccgugaacuggggccacggggagaucaacgacagcaccaccguggagccgaugcuggacggccccuaccagcccacgaccuucacgcccccgaacgacuacuggauccucaucaacuccaacaccaacggcgucguguacgagagcaccaacaacuccgacuucuggaccgccguggucgcgaucgagccccacgugaaccccguggaccgccaguacaccaucuucggggagagcaagcaguucaacgucuccaacgacagcaacaaguggaaguuccuggagauguuccgguccagcucccagaacgaguucuacaaccgccggacccugacgagcgacacccgcuucgugggcauccucaaguacgggggccggguguggaccuuccacggggagacgccccgcgccaccaccgacuccagcuccaccgccaaccugaacaacaucagcaucaccauccacuccgaguucuacaucaucccgcggagccaggagagcaagugcaacgaguacaucaacaacggccugugaggacuagucccuguucccagagcccacuuuuuuuucuuuuuuugaaauaaaauagccugucuuucagaucuaaaaaaaaaaaaaaaaaaaaaaaaaaaaaaaaaaaaaaaaaaaaaaaaaaaaaaaaaaaaaaaaaaaaaaaaaaaaaaaaaaaaaaaaaaaaaaaaaaaa

SEQ ID NO: 730 - RNA, 791 nt, Artificial Sequence
  mRNA product Design a-1 (A100) comprising derived and/or modified sequence from RVA/BE1058/P[4]__AEX30665.1__P2_VP8*(65-223) (opt4)
aggagagucccgcagucggcguccagcggcucugcuuguucgugugugugucguugcaggccuuauucaagcuuaccaugcaguacaucaaggccaacagcaaguucaucggcaucaccgagcugggcagcggcagcggccuggacggccccuaccagcccaccaccuucaagccccccaacgacuacuggcugcugaucagcagcaacaccgacggcgugguguacgagagcaccaacaacagcgacuucuggaccgccgugaucgccguggagccccacgugaaccagaccaacagacaguacgugcuguucggcgagaacaagcaguucaacaucgagaacagcagcgacaaguggaaguucuucgagauguucaagggcaacagccagagcgacuucagcaacagaagaacccugaccagcagcaacagacuggugggcaugcugaaguacggcggcagaguguggaccuuccacggcgagacccccagagccaccaccgacagcagcagcaccgccgaccugaacaacaucagcaucaucauccacagcgaguucuacaucauccccagaagccaggagagcaagugcaacgaguacaucaacaacggccugugaggacuagucccuguucccagagcccacuuuuuuuucuuuuuuugaaauaaaauagccugucuuucagaucuaaaaaaaaaaaaaaaaaaaaaaaaaaaaaaaaaaaaaaaaaaaaaaaaaaaaaaaaaaaaaaaaaaaaaaaaaaaaaaaaaaaaaaaaaaaaaaaaaaaa

SEQ ID NO: 731 - RNA, 791 nt, Artificial Sequence
  mRNA product Design a-1 (A100) comprising derived and/or modified sequence from RVA/DS-1/P[4]__CAD62680.1__P2_VP8*(65-223) (opt4)
aggagagucccgcagucggcguccagcggcucugcuuguucgugugugugucguugcaggccuuauucaagcuuaccaugcaguacaucaaggccaacagcaaguucaucggcaucaccgagcugggcagcggcagcggccuggacggccccuaccagcccaccaccuucaagccccccaacgacuacuggcugcugaucagcagcaacaccaacggcgugguguacgagagcaccaacaacaacgacuucuggaccgccgugagcagcguggagccccacgugagccagaccaacagacaguacauccuguucggcgagaacaagcaguucaacguggagaacaacagcgacaaguggaaguucuucgagaccuucaccggcagcagccagggcaacuucagcaacagaagaacccugaccagcagcaacagacuggugggcaugcugaaguacggcggcagaguguggaccuuccacggcgagacccccagagccaccaccgacagcagcaacaccgccgaccugaacaacaucagcaucaucauccacagcgaguucuacaucauccccagaagccaggagagcaagugcaacgaguacaucaacaacggccugugaggacuagucccuguucccagagcccacuuuuuuuucuuuuuuugaaauaaaauagccugucuuucagaucuaaaaaaaaaaaaaaaaaaaaaaaaaaaaaaaaaaaaaaaaaaaaaaaaaaaaaaaaaaaaaaaaaaaaaaaaaaaaaaaaaaaaaaaaaaaaaaaaaaaa

SEQ ID NO: 732 - RNA, 791 nt, Artificial Sequence; identical to SEQ ID NO: 731
  mRNA product Design a-1 (A100) comprising derived and/or modified sequence from RVA/DS-1/P[4]__ABV53252.1__P2_VP8*(65-223) (opt4)

SEQ ID NO: 733 - RNA, 791 nt, Artificial Sequence
  mRNA product Design a-1 (A100) comprising derived and/or modified sequence from RVA/F01322/P[6]__AFA51886.1__P2_VP8*(65-223) (opt4)
aggagagucccgcagucggcguccagcggcucugcuuguucgugugugugucguugcaggccuuauucaagcuuaccaugcaguacaucaaggccaacagcaaguucaucggcaucaccgagcugggcagcggcagcggccuggacggccccuaccagcccaccaacuucaagccccccaacgacuacuggauccugcugaaccccaccaaccagcagguggugcuggagggcaccaacaagaccgacaucuggguggcccugcugcugguggagcccaacgugaccaaccagagcagacaguacacccuguucggcgagaccaagcagaucaccguggagaacaacaccaacaaguggaaguucuucgagauguucagaagcagcgugagcgccgaguuccagcacaagagaacccugaccagcgacaccaagcuggccggcuucaugaaguucuacaacagcguguggaccuuccacggcgagacccccaacgccaccaccgacuacagcagcaccagcaaccuguucgagguggagaccgugauccacguggaguucuacaucauccccagaagccaggagagcaagugcagcgaguacaucaacaccggccugugaggacuagucccuguucccagagcccacuuuuuuuucuuuuuuugaaauaaaauagccugucuuucagaucuaaaaaaaaaaaaaaaaaaaaaaaaaaaaaaaaaaaaaaaaaaaaaaaaaaaaaaaaaaaaaaaaaaaaaaaaaaaaaaaaaaaaaaaaaaaaaaaaaaaa

SEQ ID NO: 734 - RNA, 791 nt, Artificial Sequence
  mRNA product Design a-1 (A100) comprising derived and/or modified sequence from RVA/1076/P[6]__AAA47337.1__P2_VP8*(65-223) (opt4)
aggagagucccgcagucggcguccagcggcucugcuuguucgugugugugucguugcaggccuuauucaagcuuaccaugcaguacaucaaggccaacagcaaguucaucggcaucaccgagcugggcagcggcagcggccuggacggccccuaccagcccaccagcuucaagccccccagcgacuacuggauccugcugaaccccaccaaccagcagguggugcuggagggcaccaacaagaccgacaucuggguggcccugcugcugguggagcccaacgugaccaaccagagcagacaguacacccuguucggcgagaccaagcagaucaccguggagaacaacaccaacaaguggaaguucuucgagauguucagaagcagcgugagcgccgaguuccagcacaagagaacccugaccagcgacaccaagcuggccggcuuccugaaguucuacaacagcguguggaccuucuacggcgagaccccccacgccaccaccgacuacagcagcaccagcaaccugagcgagguggagaccgccauccacguggaguucuacaucauccccagaagccaggagagcaagugcaacgaguacaucaacaccggccugugaggacuagucccuguucccagagcccacuuuuuuuucuuuuuuugaaauaaaauagccugucuuucagaucuaaaaaaaaaaaaaaaaaaaaaaaaaaaaaaaaaaaaaaaaaaaaaaaaaaaaaaaaaaaaaaaaaaaaaaaaaaaaaaaaaaaaaaaaaaaaaaaaaaaa

SEQ ID NO: 735 - RNA, 791 nt, Artificial Sequence
  mRNA product Design a-1 (A100) comprising derived and/or modified sequence from RVA/BE1128/P[8]__AEX30671.1__P2_VP8*(65-223) (opt4)
aggagagucccgcagucggcguccagcggcucugcuuguucgugugugugucguugcaggccuuauucaagcuuaccaugcaguacaucaaggccaacagcaaguucaucggcaucaccgagcugggcagcggcagcggccuggacggccccuaccagcccaccaccuucaccccccccaccgacuacuggauccugaucaccagcaacaccaacggcgugguguacgagagcaccaacaacagcgacuucuggaccgccgugaucgccguggagccccacgugaaccccguggacagacaguacaacguguucggcgagaacaagcaguucaacgugagaaacgacagcgacaaguggaaguuccuggagauguucagaggcagcagccagaacgacuucuacaacagaagaacccugaccagcgacaccagacuggugggcauccugaaguacggcggcagaguguggaccuuccacggcgagacccccagagccaccaccgacagcagcaacaccgccaaccuggacggcaucagcaucaccauccacagcgaguucuacaucauccccagaagccaggagagcaagugcaacgaguacaucaacaacggccugugaggacuagucccuguucccagagcccacuuuuuuuucuuuuuuugaaauaaaauagccugucuuucagaucuaaaaaaaaaaaaaaaaaaaaaaaaaaaaaaaaaaaaaaaaaaaaaaaaaaaaaaaaaaaaaaaaaaaaaaaaaaaaaaaaaaaaaaaaaaaaaaaaaaaa

SEQ ID NO: 736 - RNA, 791 nt, Artificial Sequence
  mRNA product Design a-1 (A100) comprising derived and/or modified sequence from RVA/Wa-VirWa/P[8]__ACR22783.1__P2_VP8*(65-223) (opt4)
aggagagucccgcagucggcguccagcggcucugcuuguucgugugugugucguugcaggccuuauucaagcuuaccaugcaguacaucaaggccaacagcaaguucaucggcaucaccgagcugggcagcggcagcggccuggacggccccuaccagcccaccaccuucaccccccccaacgacuacuggauccugaucaacagcaacaccaacggcgugguguacgagagcaccaacaacagcgacuucuggaccgccgugguggccaucgagccccacgugaaccccguggacagacaguacaccaucuucggcgagagcaagcaguucaacgugagaaacgacagcaacaaguggaaguuccuggagauguucagaagcagcagccagaacgaguucuacaacagaagaacccugaccagcgacaccagacuggugggcauccugaaguacggcggcagaguguggaccuuccacggcgagacccccagagccaccaccgacagcagcagcaccgccaaccugaacaacaucagcaucaccauccacagcgaguucuacaucauccccagaagccaggagagcaagugcaacgaguacaucaacaacggccugugaggacuagucccuguucccagagcccacuuuuuuuucuuuuuuugaaauaaaauagccugucuuucagaucuaaaaaaaaaaaaaaaaaaaaaaaaaaaaaaaaaaaaaaaaaaaaaaaaaaaaaaaaaaaaaaaaaaaaaaaaaaaaaaaaaaaaaaaaaaaaaaaaaaaa

SEQ ID NO: 737 - RNA, 791 nt, Artificial Sequence
  mRNA product Design a-1 (A100) comprising derived and/or modified sequence from RVA/Wa/P[8]__AAA47290.1__P2_VP8*(65-223) (opt4)
aggagagucccgcagucggcguccagcggcucugcuuguucgugugugugucguugcaggccuuauucaagcuuaccaugcaguacaucaaggccaacagcaaguucaucggcaucaccgagcugggcagcggcagcggccuggacggccccuaccagcccaccaccuucaccccccccaacgacuacuggauccugaucaacagcaacaccaacggcgugguguacgagagcaccaacaacagcgacuucuggaccgccgugguggccaucgagccccacgugaaccccguggacagacaguacaccaucuucggcgagagcaagcaguucaacgugagcaacgacagcaacaaguggaaguuccuggagauguucagaagcagcagccagaacgaguucuacaacagaagaacccugaccagcgacaccagauucgugggcauccugaaguacggcggcagaguguggaccuuccacggcgagacccccagagccaccaccgacagcagcagcaccgccaaccugaacaacaucagcaucaccauccacagcgaguucuacaucauccccagaagccaggagagcaagugcaacgaguacaucaacaacggccugugaggacuagucccuguucccagagcccacuuuuuuuucuuuuuuugaaauaaaauagccugucuuucagaucuaaaaaaaaaaaaaaaaaaaaaaaaaaaaaaaaaaaaaaaaaaaaaaaaaaaaaaaaaaaaaaaaaaaaaaaaaaaaaaaaaaaaaaaaaaaaaaaaaaaa

SEQ ID NO: 738 - RNA, 791 nt, Artificial Sequence; identical to SEQ ID NO: 737
  mRNA product Design a-1 (A100) comprising derived and/or modified sequence from RVA/Wa/P[8]__AAA66953.1__P2_VP8*(65-223) (opt4)

SEQ ID NO: 739 - RNA, 863 nt, Artificial Sequence
  mRNA product Design a-1 (A100) comprising derived and/or modified sequence from RVA/BE1058/P[4]__AEX30665.1__P2_VP8*(41-223) (opt4)
aggagagucccgcagucggcguccagcggcucugcuuguucgugugugugucguugcaggccuuauucaagcuuaccaugcaguacaucaaggccaacagcaaguucaucggcaucaccgagcugggcagcggcagcggcgcccagaccagauacgcccccgugaacuggggccacggcgagaucaacgacagcaccaccguggagcccgugcuggacggccccuaccagcccaccaccuucaagccccccaacgacuacuggcugcugaucagcagcaacaccgacggcgugguguacgagagcaccaacaacagcgacuucuggaccgccgugaucgccguggagccccacgugaaccagaccaacagacaguacgugcuguucggcgagaacaagcaguucaacaucgagaacagcagcgacaaguggaaguucuucgagauguucaagggcaacagccagagcgacuucagcaacagaagaacccugaccagcagcaacagacuggugggcaugcugaaguacggcggcagaguguggaccuuccacggcgagacccccagagccaccaccgacagcagcagcaccgccgaccugaacaacaucagcaucaucauccacagcgaguucuacaucauccccagaagccaggagagcaagugcaacgaguacaucaacaacggccugugaggacuagucccuguucccagagcccacuuuuuuuucuuuuuuugaaauaaaauagccugucuuucagaucuaaaaaaaaaaaaaaaaaaaaaaaaaaaaaaaaaaaaaaaaaaaaaaaaaaaaaaaaaaaaaaaaaaaaaaaaaaaaaaaaaaaaaaaaaaaaaaaaaaaa

SEQ ID NO: 740 - RNA, 863 nt, Artificial Sequence
  mRNA product Design a-1 (A100) comprising derived and/or modified sequence from RVA/DS-1/P[4]__CAD62680.1__P2_VP8*(41-223) (opt4)
aggagagucccgcagucggcguccagcggcucugcuuguucgugugugugucguugcaggccuuauucaagcuuaccaugcaguacaucaaggccaacagcaaguucaucggcaucaccgagcugggcagcggcagcggcgcccagaccagauacgcccccgugaacuggggcagcugggagaucaacgacagcaccaccguggagcccgugcuggacggccccuaccagcccaccaccuucaagccccccaacgacuacuggcugcugaucagcagcaacaccaacggcgugguguacgagagcaccaacaacaacgacuucuggaccgccgugagcagcguggagccccacgugagccagaccaacagacaguacauccuguucggcgagaacaagcaguucaacguggagaacaacagcgacaaguggaaguucuucgagaccuucaccggcagcagccagggcaacuucagcaacagaagaacccugaccagcagcaacagacuggugggcaugcugaaguacggcggcagaguguggaccuuccacggcgagacccccagagccaccaccgacagcagcaacaccgccgaccugaacaacaucagcaucaucauccacagcgaguucuacaucauccccagaagccaggagagcaagugcaacgaguacaucaacaacggccugugaggacuagucccuguucccagagcccacuuuuuuuucuuuuuuugaaauaaaauagccugucuuucagaucuaaaaaaaaaaaaaaaaaaaaaaaaaaaaaaaaaaaaaaaaaaaaaaaaaaaaaaaaaaaaaaaaaaaaaaaaaaaaaaaaaaaaaaaaaaaaaaaaaaaa

SEQ ID NO: 741 - RNA, 863 nt, Artificial Sequence; identical to SEQ ID NO: 740
  mRNA product Design a-1 (A100) comprising derived and/or modified sequence from RVA/DS-1/P[4]__ABV53252.1__P2_VP8*(41-223) (opt4)

SEQ ID NO: 742 - RNA, 863 nt, Artificial Sequence
  mRNA product Design a-1 (A100) comprising derived and/or modified sequence from RVA/F01322/P[6]__AFA51886.1__P2_VP8*(41-223) (opt4)
aggagagucccgcagucggcguccagcggcucugcuuguucgugugugugucguugcaggccuuauucaagcuuaccaugcaguacaucaaggccaacagcaaguucaucggcaucaccgagcugggcagcggcagcggcgcccagaccaacuacgcccccgugaccuggagccacggcgaggugaacgacagcaccaccaucgagcccgugcuggacggccccuaccagcccaccaacuucaagccccccaacgacuacuggauccugcugaaccccaccaaccagcagguggugcuggagggcaccaacaagaccgacaucuggguggcccugcugcugguggagcccaacgugaccaaccagagcagacaguacacccuguucggcgagaccaagcagaucaccguggagaacaacaccaacaaguggaaguucuucgagauguucagaagcagcgugagcgccgaguuccagcacaagagaacccugaccagcgacaccaagcuggccggcuucaugaaguucuacaacagcguguggaccuuccacggcgagacccccaacgccaccaccgacuacagcagcaccagcaaccuguucgagguggagaccgugauccacguggaguucuacaucauccccagaagccaggagagcaagugcagcgaguacaucaacaccggccugugaggacuagucccuguucccagagcccacuuuuuuuucuuuuuuugaaauaaaauagccugucuuucagaucuaaaaaaaaaaaaaaaaaaaaaaaaaaaaaaaaaaaaaaaaaaaaaaaaaaaaaaaaaaaaaaaaaaaaaaaaaaaaaaaaaaaaaaaaaaaaaaaaaaaa

SEQ ID NO: 743 - RNA, 863 nt, Artificial Sequence
  mRNA product Design a-1 (A100) comprising derived and/or modified sequence from RVA/1076/P[6]__AAA47337.1__P2_VP8*(41-223) (opt4)
aggagagucccgcagucggcguccagcggcucugcuuguucgugugugugucguugcaggccuuauucaagcuuaccaugcaguacaucaaggccaacagcaaguucaucggcaucaccgagcugggcagcggcagcggcgcccagaccaacuacgcccccgugaccuggagccacggcgaggugaacgacagcaccaccaucgagcccgugcuggacggccccuaccagcccaccagcuucaagccccccagcgacuacuggauccugcugaaccccaccaaccagcagguggugcuggagggcaccaacaagaccgacaucuggguggcccugcugcugguggagcccaacgugaccaaccagagcagacaguacacccuguucggcgagaccaagcagaucaccguggagaacaacaccaacaaguggaaguucuucgagauguucagaagcagcgugagcgccgaguuccagcacaagagaacccugaccagcgacaccaagcuggccggcuuccugaaguucuacaacagcguguggaccuucuacggcgagaccccccacgccaccaccgacuacagcagcaccagcaaccugagcgagguggagaccgccauccacguggaguucuacaucauccccagaagccaggagagcaagugcaacgaguacaucaacaccggccugugaggacuagucccuguucccagagcccacuuuuuuuucuuuuuuugaaauaaaauagccugucuuucagaucuaaaaaaaaaaaaaaaaaaaaaaaaaaaaaaaaaaaaaaaaaaaaaaaaaaaaaaaaaaaaaaaaaaaaaaaaaaaaaaaaaaaaaaaaaaaaaaaaaaaa

SEQ ID NO: 744 - RNA, 863 nt, Artificial Sequence
  mRNA product Design a-1 (A100) comprising derived and/or modified sequence from RVA/BE1128/P[8]__AEX30671.1__P2_VP8*(41-223) (opt4)
aggagagucccgcagucggcguccagcggcucugcuuguucgugugugugucguugcaggccuuauucaagcuuaccaugcaguacaucaaggccaacagcaaguucaucggcaucaccgagcugggcagcggcagcggcgcccagaccagauacgcccccgugaacuggggccacggcgagaucaacgacagcaccaccguggagcccauccuggacggccccuaccagcccaccaccuucaccccccccaccgacuacuggauccugaucaccagcaacaccaacggcgugguguacgagagcaccaacaacagcgacuucuggaccgccgugaucgccguggagccccacgugaaccccguggacagacaguacaacguguucggcgagaacaagcaguucaacgugagaaacgacagcgacaaguggaaguuccuggagauguucagaggcagcagccagaacgacuucuacaacagaagaacccugaccagcgacaccagacuggugggcauccugaaguacggcggcagaguguggaccuuccacggcgagacccccagagccaccaccgacagcagcaacaccgccaaccuggacggcaucagcaucaccauccacagcgaguucuacaucauccccagaagccaggagagcaagugcaacgaguacaucaacaacggccugugaggacuagucccuguucccagagcccacuuuuuuuucuuuuuuugaaauaaaauagccugucuuucagaucuaaaaaaaaaaaaaaaaaaaaaaaaaaaaaaaaaaaaaaaaaaaaaaaaaaaaaaaaaaaaaaaaaaaaaaaaaaaaaaaaaaaaaaaaaaaaaaaaaaaa

SEQ ID NO: 745 - RNA, 863 nt, Artificial Sequence
  mRNA product Design a-1 (A100) comprising derived and/or modified sequence from RVA/Wa-VirWa/P[8]__ACR22783.1__P2_VP8*(41-223) (opt4)
aggagagucccgcagucggcguccagcggcucugcuuguucgugugugugucguugcaggccuuauucaagcuuaccaugcaguacaucaaggccaacagcaaguucaucggcaucaccgagcugggcagcggcagcggcgcccagaccagauacgcccccgugaacuggggccacggcgagaucaacgacagcaccaccguggagcccauccuggacggccccuaccagcccaccaccuucaccccccccaacgacuacuggauccugaucaacagcaacaccaacggcgugguguacgagagcaccaacaacagcgacuucuggaccgccgugguggccaucgagccccacgugaaccccguggacagacaguacaccaucuucggcgagagcaagcaguucaacgugagaaacgacagcaacaaguggaaguuccuggagauguucagaagcagcagccagaacgaguucuacaacagaagaacccugaccagcgacaccagacuggugggcauccugaaguacggcggcagaguguggaccuuccacggcgagacccccagagccaccaccgacagcagcagcaccgccaaccugaacaacaucagcaucaccauccacagcgaguucuacaucauccccagaagccaggagagcaagugcaacgaguacaucaacaacggccugugaggacuagucccuguucccagagcccacuuuuuuuucuuuuuuugaaauaaaauagccugucuuucagaucuaaaaaaaaaaaaaaaaaaaaaaaaaaaaaaaaaaaaaaaaaaaaaaaaaaaaaaaaaaaaaaaaaaaaaaaaaaaaaaaaaaaaaaaaaaaaaaaaaaaa

SEQ ID NO: 746 - RNA, 863 nt, Artificial Sequence
  mRNA product Design a-1 (A100) comprising derived and/or modified sequence from RVA/Wa/P[8]__AAA47290.1__P2_VP8*(41-223) (opt4)
aggagagucccgcagucggcguccagcggcucugcuuguucgugugugugucguugcaggccuuauucaagcuuaccaugcaguacaucaaggccaacagcaaguucaucggcaucaccgagcugggcagcggcagcggcgcccagaccagauacgcccccgugaacuggggccacggcgagaucaacgacagcaccaccguggagcccauccuggacggccccuaccagcccaccaccuucaccccccccaacgacuacuggauccugaucaacagcaacaccaacggcgugguguacgagagcaccaacaacagcgacuucuggaccgccgugguggccaucgagccccacgugaaccccguggacagacaguacaccaucuucggcgagagcaagcaguucaacgugagcaacgacagcaacaaguggaaguuccuggagauguucagaagcagcagccagaacgaguucuacaacagaagaacccugaccagcgacaccagauucgugggcauccugaaguacggcggcagaguguggaccuuccacggcgagacccccagagccaccaccgacagcagcagcaccgccaaccugaacaacaucagcaucaccauccacagcgaguucuacaucauccccagaagccaggagagcaagugcaacgaguacaucaacaacggccugugaggacuagucccuguucccagagcccacuuuuuuuucuuuuuuugaaauaaaauagccugucuuucagaucuaaaaaaaaaaaaaaaaaaaaaaaaaaaaaaaaaaaaaaaaaaaaaaaaaaaaaaaaaaaaaaaaaaaaaaaaaaaaaaaaaaaaaaaaaaaaaaaaaaaa

SEQ ID NO: 747 - RNA, 863 nt, Artificial Sequence
  mRNA product Design a-1 (A100) comprising derived and/or modified sequence from RVA/Wa/P[8]__AAA66953.1__P2_VP8*(41-223) (opt4)
aggagagucccgcagucggcguccagcggcucugcuuguucgugugugugucguugcaggccuuauucaagcuuaccaugcaguacaucaaggccaacagcaaguucaucggcaucaccgagcugggcagcggcagcggcgcccagaccagauacgcccccgugaacuggggccacggcgagaucaacgacagcaccaccguggagcccaugcuggacggccccuaccagcccaccaccuucaccccccccaacgacuacuggauccugaucaacagcaacaccaacggcgugguguacgagagcaccaacaacagcgacuucuggaccgccgugguggccaucgagccccacgugaaccccguggacagacaguacaccaucuucggcgagagcaagcaguucaacgugagcaacgacagcaacaaguggaaguuccuggagauguucagaagcagcagccagaacgaguucuacaacagaagaacccugaccagcgacaccagauucgugggcauccugaaguacggcggcagaguguggaccuuccacggcgagacccccagagccaccaccgacagcagcagcaccgccaaccugaacaacaucagcaucaccauccacagcgaguucuacaucauccccagaagccaggagagcaagugcaacgaguacaucaacaacggccugugaggacuagucccuguucccagagcccacuuuuuuuucuuuuuuugaaauaaaauagccugucuuucagaucuaaaaaaaaaaaaaaaaaaaaaaaaaaaaaaaaaaaaaaaaaaaaaaaaaaaaaaaaaaaaaaaaaaaaaaaaaaaaaaaaaaaaaaaaaaaaaaaaaaaa

SEQ ID NO: 748 - RNA, 1289 nt, Artificial Sequence
  mRNA product Design a-1 (A100) comprising derived and/or modified sequence from RVA/BE1058/P[4]__AEX30665.1__P2_VP8*(65-223)_Ferritin (opt4)
aggagagucccgcagucggcguccagcggcucugcuuguucgugugugugucguugcaggccuuauucaagcuuaccaugcaguacaucaaggccaacagcaaguucaucggcaucaccgagcugggcagcggcagcggccuggacggccccuaccagcccaccaccuucaagccccccaacgacuacuggcugcugaucagcagcaacaccgacggcgugguguacgagagcaccaacaacagcgacuucuggaccgccgugaucgccguggagccccacgugaaccagaccaacagacaguacgugcuguucggcgagaacaagcaguucaacaucgagaacagcagcgacaaguggaaguucuucgagauguucaagggcaacagccagagcgacuucagcaacagaagaacccugaccagcagcaacagacuggugggcaugcugaaguacggcggcagaguguggaccuuccacggcgagacccccagagccaccaccgacagcagcagcaccgccgaccugaacaacaucagcaucaucauccacagcgaguucuacaucauccccagaagccaggagagcaagugcaacgaguacaucaacaacggccugagcggcggcgacaucaucaagcugcugaacgagcaggugaacaaggagaugcagagcagcaaccuguacaugagcaugagcagcuggugcuacacccacagccuggacggcgccggccuguuccuguucgaccacgccgccgaggaguacgagcacgccaagaagcugaucaucuuccugaacgagaacaacgugcccgugcagcugaccagcaucagcgcccccgagcacaaguucgagggccugacccagaucuuccagaaggccuacgagcacgagcagcacaucagcgagagcaucaacaacaucguggaccacgccaucaagagcaaggaccacgccaccuucaacuuccugcagugguacguggccgagcagcacgaggaggaggugcuguucaaggacauccuggacaagaucgagcugaucggcaacgagaaccacggccuguaccuggccgaccaguacgugaagggcaucgccaagagcagaaagagcugaggacuagucccuguucccagagcccacuuuuuuuucuuuuuuugaaauaaaauagccugucuuucagaucuaaaaaaaaaaaaaaaaaaaaaaaaaaaaaaaaaaaaaaaaaaaaaaaaaaaaaaaaaaaaaaaaaaaaaaaaaaaaaaaaaaaaaaaaaaaaaaaaaaaa

SEQ ID NO: 749 - RNA, 1289 nt, Artificial Sequence
  mRNA product Design a-1 (A100) comprising derived and/or modified sequence from RVA/DS-1/P[4]__CAD62680.1__P2_VP8*(65-223)_Ferritin (opt4)
aggagagucccgcagucggcguccagcggcucugcuuguucgugugugugucguugcaggccuuauucaagcuuaccaugcaguacaucaaggccaacagcaaguucaucggcaucaccgagcugggcagcggcagcggccuggacggccccuaccagcccaccaccuucaagccccccaacgacuacuggcugcugaucagcagcaacaccaacggcgugguguacgagagcaccaacaacaacgacuucuggaccgccgugagcagcguggagccccacgugagccagaccaacagacaguacauccuguucggcgagaacaagcaguucaacguggagaacaacagcgacaaguggaaguucuucgagaccuucaccggcagcagccagggcaacuucagcaacagaagaacccugaccagcagcaacagacuggugggcaugcugaaguacggcggcagaguguggaccuuccacggcgagacccccagagccaccaccgacagcagcaacaccgccgaccugaacaacaucagcaucaucauccacagcgaguucuacaucauccccagaagccaggagagcaagugcaacgaguacaucaacaacggccugagcggcggcgacaucaucaagcugcugaacgagcaggugaacaaggagaugcagagcagcaaccuguacaugagcaugagcagcuggugcuacacccacagccuggacggcgccggccuguuccuguucgaccacgccgccgaggaguacgagcacgccaagaagcugaucaucuuccugaacgagaacaacgugcccgugcagcugaccagcaucagcgcccccgagcacaaguucgagggccugacccagaucuuccagaaggccuacgagcacgagcagcacaucagcgagagcaucaacaacaucguggaccacgccaucaagagcaaggaccacgccaccuucaacuuccugcagugguacguggccgagcagcacgaggaggaggugcuguucaaggacauccuggacaagaucgagcugaucggcaacgagaaccacggccuguaccuggccgaccaguacgugaagggcaucgccaagagcagaaagagcugaggacuagucccuguucccagagcccacuuuuuuuucuuuuuuugaaauaaaauagccugucuuucagaucuaaaaaaaaaaaaaaaaaaaaaaaaaaaaaaaaaaaaaaaaaaaaaaaaaaaaaaaaaaaaaaaaaaaaaaaaaaaaaaaaaaaaaaaaaaaaaaaaaaaa

SEQ ID NO: 750 - RNA, 1289 nt, Artificial Sequence; identical to SEQ ID NO: 749
  mRNA product Design a-1 (A100) comprising derived and/or modified sequence from RVA/DS-1/P[4]__ABV53252.1__P2_VP8*(65-223)_Ferritin (opt4)

SEQ ID NO: 751 - RNA, 1289 nt, Artificial Sequence
  mRNA product Design a-1 (A100) comprising derived and/or modified sequence from RVA/F01322/P[6]__AFA51886.1__P2_VP8*(65-223)_Ferritin (opt4)
aggagagucccgcagucggcguccagcggcucugcuuguucgugugugugucguugcaggccuuauucaagcuuaccaugcaguacaucaaggccaacagcaaguucaucggcaucaccgagcugggcagcggcagcggccuggacggccccuaccagcccaccaacuucaagccccccaacgacuacuggauccugcugaaccccaccaaccagcagguggugcuggagggcaccaacaagaccgacaucuggguggcccugcugcugguggagcccaacgugaccaaccagagcagacaguacacccuguucggcgagaccaagcagaucaccguggagaacaacaccaacaaguggaaguucuucgagauguucagaagcagcgugagcgccgaguuccagcacaagagaacccugaccagcgacaccaagcuggccggcuucaugaaguucuacaacagcguguggaccuuccacggcgagacccccaacgccaccaccgacuacagcagcaccagcaaccuguucgagguggagaccgugauccacguggaguucuacaucauccccagaagccaggagagcaagugcagcgaguacaucaacaccggccugagcggcggcgacaucaucaagcugcugaacgagcaggugaacaaggagaugcagagcagcaaccuguacaugagcaugagcagcuggugcuacacccacagccuggacggcgccggccuguuccuguucgaccacgccgccgaggaguacgagcacgccaagaagcugaucaucuuccugaacgagaacaacgugcccgugcagcugaccagcaucagcgcccccgagcacaaguucgagggccugacccagaucuuccagaaggccuacgagcacgagcagcacaucagcgagagcaucaacaacaucguggaccacgccaucaagagcaaggaccacgccaccuucaacuuccugcagugguacguggccgagcagcacgaggaggaggugcuguucaaggacauccuggacaagaucgagcugaucggcaacgagaaccacggccuguaccuggccgaccaguacgugaagggcaucgccaagagcagaaagagcugaggacuagucccuguucccagagcccacuuuuuuuucuuuuuuugaaauaaaauagccugucuuucagaucuaaaaaaaaaaaaaaaaaaaaaaaaaaaaaaaaaaaaaaaaaaaaaaaaaaaaaaaaaaaaaaaaaaaaaaaaaaaaaaaaaaaaaaaaaaaaaaaaaaaa

SEQ ID NO: 752 - RNA, 1289 nt, Artificial Sequence
  mRNA product Design a-1 (A100) comprising derived and/or modified sequence from RVA/1076/P[6]__AAA47337.1__P2_VP8*(65-223)_Ferritin (opt4)
aggagagucccgcagucggcguccagcggcucugcuuguucgugugugugucguugcaggccuuauucaagcuuaccaugcaguacaucaaggccaacagcaaguucaucggcaucaccgagcugggcagcggcagcggccuggacggccccuaccagcccaccagcuucaagccccccagcgacuacuggauccugcugaaccccaccaaccagcagguggugcuggagggcaccaacaagaccgacaucuggguggcccugcugcugguggagcccaacgugaccaaccagagcagacaguacacccuguucggcgagaccaagcagaucaccguggagaacaacaccaacaaguggaaguucuucgagauguucagaagcagcgugagcgccgaguuccagcacaagagaacccugaccagcgacaccaagcuggccggcuuccugaaguucuacaacagcguguggaccuucuacggcgagaccccccacgccaccaccgacuacagcagcaccagcaaccugagcgagguggagaccgccauccacguggaguucuacaucauccccagaagccaggagagcaagugcaacgaguacaucaacaccggccugagcggcggcgacaucaucaagcugcugaacgagcaggugaacaaggagaugcagagcagcaaccuguacaugagcaugagcagcuggugcuacacccacagccuggacggcgccggccuguuccuguucgaccacgccgccgaggaguacgagcacgccaagaagcugaucaucuuccugaacgagaacaacgugcccgugcagcugaccagcaucagcgcccccgagcacaaguucgagggccugacccagaucuuccagaaggccuacgagcacgagcagcacaucagcgagagcaucaacaacaucguggaccacgccaucaagagcaaggaccacgccaccuucaacuuccugcagugguacguggccgagcagcacgaggaggaggugcuguucaaggacauccuggacaagaucgagcugaucggcaacgagaaccacggccuguaccuggccgaccaguacgugaagggcaucgccaagagcagaaagagcugaggacuagucccuguucccagagcccacuuuuuuuucuuuuuuugaaauaaaauagccugucuuucagaucuaaaaaaaaaaaaaaaaaaaaaaaaaaaaaaaaaaaaaaaaaaaaaaaaaaaaaaaaaaaaaaaaaaaaaaaaaaaaaaaaaaaaaaaaaaaaaaaaaaaa

SEQ ID NO: 753 - RNA, 1289 nt, Artificial Sequence
  mRNA product Design a-1 (A100) comprising derived and/or modified sequence from RVA/BE1128/P[8]__AEX30671.1__P2_VP8*(65-223)_Ferritin (opt4)
aggagagucccgcagucggcguccagcggcucugcuuguucgugugugugucguugcaggccuuauucaagcuuaccaugcaguacaucaaggccaacagcaaguucaucggcaucaccgagcugggcagcggcagcggccuggacggccccuaccagcccaccaccuucaccccccccaccgacuacuggauccugaucaccagcaacaccaacggcgugguguacgagagcaccaacaacagcgacuucuggaccgccgugaucgccguggagccccacgugaaccccguggacagacaguacaacguguucggcgagaacaagcaguucaacgugagaaacgacagcgacaaguggaaguuccuggagauguucagaggcagcagccagaacgacuucuacaacagaagaacccugaccagcgacaccagacuggugggcauccugaaguacggcggcagaguguggaccuuccacggcgagacccccagagccaccaccgacagcagcaacaccgccaaccuggacggcaucagcaucaccauccacagcgaguucuacaucauccccagaagccaggagagcaagugcaacgaguacaucaacaacggccugagcggcggcgacaucaucaagcugcugaacgagcaggugaacaaggagaugcagagcagcaaccuguacaugagcaugagcagcuggugcuacacccacagccuggacggcgccggccuguuccuguucgaccacgccgccgaggaguacgagcacgccaagaagcugaucaucuuccugaacgagaacaacgugcccgugcagcugaccagcaucagcgcccccgagcacaaguucgagggccugacccagaucuuccagaaggccuacgagcacgagcagcacaucagcgagagcaucaacaacaucguggaccacgccaucaagagcaaggaccacgccaccuucaacuuccugcagugguacguggccgagcagcacgaggaggaggugcuguucaaggacauccuggacaagaucgagcugaucggcaacgagaaccacggccuguaccuggccgaccaguacgugaagggcaucgccaagagcagaaagagcugaggacuagucccuguucccagagcccacuuuuuuuucuuuuuuugaaauaaaauagccugucuuucagaucuaaaaaaaaaaaaaaaaaaaaaaaaaaaaaaaaaaaaaaaaaaaaaaaaaaaaaaaaaaaaaaaaaaaaaaaaaaaaaaaaaaaaaaaaaaaaaaaaaaaa

SEQ ID NO: 754 - RNA, 1289 nt, Artificial Sequence
  mRNA product Design a-1 (A100) comprising derived and/or modified sequence from RVA/Wa-VirWa/P[8]__ACR22783.1__P2_VP8*(65-223)_Ferritin (opt4)
aggagagucccgcagucggcguccagcggcucugcuuguucgugugugugucguugcaggccuuauucaagcuuaccaugcaguacaucaaggccaacagcaaguucaucggcaucaccgagcugggcagcggcagcggccuggacggccccuaccagcccaccaccuucaccccccccaacgacuacuggauccugaucaacagcaacaccaacggcgugguguacgagagcaccaacaacagcgacuucuggaccgccgugguggccaucgagccccacgugaaccccguggacagacaguacaccaucuucggcgagagcaagcaguucaacgugagaaacgacagcaacaaguggaaguuccuggagauguucagaagcagcagccagaacgaguucuacaacagaagaacccugaccagcgacaccagacuggugggcauccugaaguacggcggcagaguguggaccuuccacggcgagacccccagagccaccaccgacagcagcagcaccgccaaccugaacaacaucagcaucaccauccacagcgaguucuacaucauccccagaagccaggagagcaagugcaacgaguacaucaacaacggccugagcggcggcgacaucaucaagcugcugaacgagcaggugaacaaggagaugcagagcagcaaccuguacaugagcaugagcagcuggugcuacacccacagccuggacggcgccggccuguuccuguucgaccacgccgccgaggaguacgagcacgccaagaagcugaucaucuuccugaacgagaacaacgugcccgugcagcugaccagcaucagcgcccccgagcacaaguucgagggccugacccagaucuuccagaaggccuacgagcacgagcagcacaucagcgagagcaucaacaacaucguggaccacgccaucaagagcaaggaccacgccaccuucaacuuccugcagugguacguggccgagcagcacgaggaggaggugcuguucaaggacauccuggacaagaucgagcugaucggcaacgagaaccacggccuguaccuggccgaccaguacgugaagggcaucgccaagagcagaaagagcugaggacuagucccuguucccagagcccacuuuuuuuucuuuuuuugaaauaaaauagccugucuuucagaucuaaaaaaaaaaaaaaaaaaaaaaaaaaaaaaaaaaaaaaaaaaaaaaaaaaaaaaaaaaaaaaaaaaaaaaaaaaaaaaaaaaaaaaaaaaaaaaaaaaaa

SEQ ID NO: 755 - RNA, 1289 nt, Artificial Sequence
  mRNA product Design a-1 (A100) comprising derived and/or modified sequence from RVA/Wa/P[8]__AAA47290.1__P2_VP8*(65-223)_Ferritin (opt4)
aggagagucccgcagucggcguccagcggcucugcuuguucgugugugugucguugcaggccuuauucaagcuuaccaugcaguacaucaaggccaacagcaaguucaucggcaucaccgagcugggcagcggcagcggccuggacggccccuaccagcccaccaccuucaccccccccaacgacuacuggauccugaucaacagcaacaccaacggcgugguguacgagagcaccaacaacagcgacuucuggaccgccgugguggccaucgagccccacgugaaccccguggacagacaguacaccaucuucggcgagagcaagcaguucaacgugagcaacgacagcaacaaguggaaguuccuggagauguucagaagcagcagccagaacgaguucuacaacagaagaacccugaccagcgacaccagauucgugggcauccugaaguacggcggcagaguguggaccuuccacggcgagacccccagagccaccaccgacagcagcagcaccgccaaccugaacaacaucagcaucaccauccacagcgaguucuacaucauccccagaagccaggagagcaagugcaacgaguacaucaacaacggccugagcggcggcgacaucaucaagcugcugaacgagcaggugaacaaggagaugcagagcagcaaccuguacaugagcaugagcagcuggugcuacacccacagccuggacggcgccggccuguuccuguucgaccacgccgccgaggaguacgagcacgccaagaagcugaucaucuuccugaacgagaacaacgugcccgugcagcugaccagcaucagcgcccccgagcacaaguucgagggccugacccagaucuuccagaaggccuacgagcacgagcagcacaucagcgagagcaucaacaacaucguggaccacgccaucaagagcaaggaccacgccaccuucaacuuccugcagugguacguggccgagcagcacgaggaggaggugcuguucaaggacauccuggacaagaucgagcugaucggcaacgagaaccacggccuguaccuggccgaccaguacgugaagggcaucgccaagagcagaaagagcugaggacuagucccuguucccagagcccacuuuuuuuucuuuuuuugaaauaaaauagccugucuuucagaucuaaaaaaaaaaaaaaaaaaaaaaaaaaaaaaaaaaaaaaaaaaaaaaaaaaaaaaaaaaaaaaaaaaaaaaaaaaaaaaaaaaaaaaaaaaaaaaaaaaaa

SEQ ID NO: 756 - RNA, 1289 nt, Artificial Sequence; identical to SEQ ID NO: 755
  mRNA product Design a-1 (A100) comprising derived and/or modified sequence from RVA/Wa/P[8]__AAA66953.1__P2_VP8*(65-223)_Ferritin (opt4)

SEQ ID NO: 757 - RNA, 1361 nt, Artificial Sequence
  mRNA product Design a-1 (A100) comprising derived and/or modified sequence from RVA/BE1058/P[4]__AEX30665.1__P2_VP8*(41-223)_Ferritin (opt4)
aggagagucccgcagucggcguccagcggcucugcuuguucgugugugugucguugcaggccuuauucaagcuuaccaugcaguacaucaaggccaacagcaaguucaucggcaucaccgagcugggcagcggcagcggcgcccagaccagauacgcccccgugaacuggggccacggcgagaucaacgacagcaccaccguggagcccgugcuggacggccccuaccagcccaccaccuucaagccccccaacgacuacuggcugcugaucagcagcaacaccgacggcgugguguacgagagcaccaacaacagcgacuucuggaccgccgugaucgccguggagccccacgugaaccagaccaacagacaguacgugcuguucggcgagaacaagcaguucaacaucgagaacagcagcgacaaguggaaguucuucgagauguucaagggcaacagccagagcgacuucagcaacagaagaacccugaccagcagcaacagacuggugggcaugcugaaguacggcggcagaguguggaccuuccacggcgagacccccagagccaccaccgacagcagcagcaccgccgaccugaacaacaucagcaucaucauccacagcgaguucuacaucauccccagaagccaggagagcaagugcaacgaguacaucaacaacggccugagcggcggcgacaucaucaagcugcugaacgagcaggugaacaaggagaugcagagcagcaaccuguacaugagcaugagcagcuggugcuacacccacagccuggacggcgccggccuguuccuguucgaccacgccgccgaggaguacgagcacgccaagaagcugaucaucuuccugaacgagaacaacgugcccgugcagcugaccagcaucagcgcccccgagcacaaguucgagggccugacccagaucuuccagaaggccuacgagcacgagcagcacaucagcgagagcaucaacaacaucguggaccacgccaucaagagcaaggaccacgccaccuucaacuuccugcagugguacguggccgagcagcacgaggaggaggugcuguucaaggacauccuggacaagaucgagcugaucggcaacgagaaccacggccuguaccuggccgaccaguacgugaagggcaucgccaagagcagaaagagcugaggacuagucccuguucccagagcccacuuuuuuuucuuuuuuugaaauaaaauagccugucuuucagaucuaaaaaaaaaaaaaaaaaaaaaaaaaaaaaaaaaaaaaaaaaaaaaaaaaaaaaaaaaaaaaaaaaaaaaaaaaaaaaaaaaaaaaaaaaaaaaaaaaaaa

SEQ ID NO: 758 - RNA, 1361 nt, Artificial Sequence
  mRNA product Design a-1 (A100) comprising derived and/or modified sequence from RVA/DS-1/P[4]__CAD62680.1__P2_VP8*(41-223)_Ferritin (opt4)
aggagagucccgcagucggcguccagcggcucugcuuguucgugugugugucguugcaggccuuauucaagcuuaccaugcaguacaucaaggccaacagcaaguucaucggcaucaccgagcugggcagcggcagcggcgcccagaccagauacgcccccgugaacuggggcagcugggagaucaacgacagcaccaccguggagcccgugcuggacggccccuaccagcccaccaccuucaagccccccaacgacuacuggcugcugaucagcagcaacaccaacggcgugguguacgagagcaccaacaacaacgacuucuggaccgccgugagcagcguggagccccacgugagccagaccaacagacaguacauccuguucggcgagaacaagcaguucaacguggagaacaacagcgacaaguggaaguucuucgagaccuucaccggcagcagccagggcaacuucagcaacagaagaacccugaccagcagcaacagacuggugggcaugcugaaguacggcggcagaguguggaccuuccacggcgagacccccagagccaccaccgacagcagcaacaccgccgaccugaacaacaucagcaucaucauccacagcgaguucuacaucauccccagaagccaggagagcaagugcaacgaguacaucaacaacggccugagcggcggcgacaucaucaagcugcugaacgagcaggugaacaaggagaugcagagcagcaaccuguacaugagcaugagcagcuggugcuacacccacagccuggacggcgccggccuguuccuguucgaccacgccgccgaggaguacgagcacgccaagaagcugaucaucuuccugaacgagaacaacgugcccgugcagcugaccagcaucagcgcccccgagcacaaguucgagggccugacccagaucuuccagaaggccuacgagcacgagcagcacaucagcgagagcaucaacaacaucguggaccacgccaucaagagcaaggaccacgccaccuucaacuuccugcagugguacguggccgagcagcacgaggaggaggugcuguucaaggacauccuggacaagaucgagcugaucggcaacgagaaccacggccuguaccuggccgaccaguacgugaagggcaucgccaagagcagaaagagcugaggacuagucccuguucccagagcccacuuuuuuuucuuuuuuugaaauaaaauagccugucuuucagaucuaaaaaaaaaaaaaaaaaaaaaaaaaaaaaaaaaaaaaaaaaaaaaaaaaaaaaaaaaaaaaaaaaaaaaaaaaaaaaaaaaaaaaaaaaaaaaaaaaaaa

SEQ ID NO: 759 - RNA, 1361 nt, Artificial Sequence; identical to SEQ ID NO: 758
  mRNA product Design a-1 (A100) comprising derived and/or modified sequence from RVA/DS-1/P[4]__ABV53252.1__P2_VP8*(41-223)_Ferritin (opt4)

SEQ ID NO: 760 - RNA, 1361 nt, Artificial Sequence
  mRNA product Design a-1 (A100) comprising derived and/or modified sequence from RVA/F01322/P[6]__AFA51886.1__P2_VP8*(41-223)_Ferritin (opt4)
aggagagucccgcagucggcguccagcggcucugcuuguucgugugugugucguugcaggccuuauucaagcuuaccaugcaguacaucaaggccaacagcaaguucaucggcaucaccgagcugggcagcggcagcggcgcccagaccaacuacgcccccgugaccuggagccacggcgaggugaacgacagcaccaccaucgagcccgugcuggacggccccuaccagcccaccaacuucaagccccccaacgacuacuggauccugcugaaccccaccaaccagcagguggugcuggagggcaccaacaagaccgacaucuggguggcccugcugcugguggagcccaacgugaccaaccagagcagacaguacacccuguucggcgagaccaagcagaucaccguggagaacaacaccaacaaguggaaguucuucgagauguucagaagcagcgugagcgccgaguuccagcacaagagaacccugaccagcgacaccaagcuggccggcuucaugaaguucuacaacagcguguggaccuuccacggcgagacccccaacgccaccaccgacuacagcagcaccagcaaccuguucgagguggagaccgugauccacguggaguucuacaucauccccagaagccaggagagcaagugcagcgaguacaucaacaccggccugagcggcggcgacaucaucaagcugcugaacgagcaggugaacaaggagaugcagagcagcaaccuguacaugagcaugagcagcuggugcuacacccacagccuggacggcgccggccuguuccuguucgaccacgccgccgaggaguacgagcacgccaagaagcugaucaucuuccugaacgagaacaacgugcccgugcagcugaccagcaucagcgcccccgagcacaaguucgagggccugacccagaucuuccagaaggccuacgagcacgagcagcacaucagcgagagcaucaacaacaucguggaccacgccaucaagagcaaggaccacgccaccuucaacuuccugcagugguacguggccgagcagcacgaggaggaggugcuguucaaggacauccuggacaagaucgagcugaucggcaacgagaaccacggccuguaccuggccgaccaguacgugaagggcaucgccaagagcagaaagagcugaggacuagucccuguucccagagcccacuuuuuuuucuuuuuuugaaauaaaauagccugucuuucagaucuaaaaaaaaaaaaaaaaaaaaaaaaaaaaaaaaaaaaaaaaaaaaaaaaaaaaaaaaaaaaaaaaaaaaaaaaaaaaaaaaaaaaaaaaaaaaaaaaaaaa

SEQ ID NO: 761 - RNA, 1361 nt, Artificial Sequence
  mRNA product Design a-1 (A100) comprising derived and/or modified sequence from RVA/1076/P[6]__AAA47337.1__P2_VP8*(41-223)_Ferritin (opt4)
aggagagucccgcagucggcguccagcggcucugcuuguucgugugugugucguugcaggccuuauucaagcuuaccaugcaguacaucaaggccaacagcaaguucaucggcaucaccgagcugggcagcggcagcggcgcccagaccaacuacgcccccgugaccuggagccacggcgaggugaacgacagcaccaccaucgagcccgugcuggacggccccuaccagcccaccagcuucaagccccccagcgacuacuggauccugcugaaccccaccaaccagcagguggugcuggagggcaccaacaagaccgacaucuggguggcccugcugcugguggagcccaacgugaccaaccagagcagacaguacacccuguucggcgagaccaagcagaucaccguggagaacaacaccaacaaguggaaguucuucgagauguucagaagcagcgugagcgccgaguuccagcacaagagaacccugaccagcgacaccaagcuggccggcuuccugaaguucuacaacagcguguggaccuucuacggcgagaccccccacgccaccaccgacuacagcagcaccagcaaccugagcgagguggagaccgccauccacguggaguucuacaucauccccagaagccaggagagcaagugcaacgaguacaucaacaccggccugagcggcggcgacaucaucaagcugcugaacgagcaggugaacaaggagaugcagagcagcaaccuguacaugagcaugagcagcuggugcuacacccacagccuggacggcgccggccuguuccuguucgaccacgccgccgaggaguacgagcacgccaagaagcugaucaucuuccugaacgagaacaacgugcccgugcagcugaccagcaucagcgcccccgagcacaaguucgagggccugacccagaucuuccagaaggccuacgagcacgagcagcacaucagcgagagcaucaacaacaucguggaccacgccaucaagagcaaggaccacgccaccuucaacuuccugcagugguacguggccgagcagcacgaggaggaggugcuguucaaggacauccuggacaagaucgagcugaucggcaacgagaaccacggccuguaccuggccgaccaguacgugaagggcaucgccaagagcagaaagagcugaggacuagucccuguucccagagcccacuuuuuuuucuuuuuuugaaauaaaauagccugucuuucagaucuaaaaaaaaaaaaaaaaaaaaaaaaaaaaaaaaaaaaaaaaaaaaaaaaaaaaaaaaaaaaaaaaaaaaaaaaaaaaaaaaaaaaaaaaaaaaaaaaaaaa

SEQ ID NO: 762 - RNA, 1361 nt, Artificial Sequence
  mRNA product Design a-1 (A100) comprising derived and/or modified sequence from RVA/BE1128/P[8]__AEX30671.1__P2_VP8*(41-223)_Ferritin (opt4)
aggagagucccgcagucggcguccagcggcucugcuuguucgugugugugucguugcaggccuuauucaagcuuaccaugcaguacaucaaggccaacagcaaguucaucggcaucaccgagcugggcagcggcagcggcgcccagaccagauacgcccccgugaacuggggccacggcgagaucaacgacagcaccaccguggagcccauccuggacggccccuaccagcccaccaccuucaccccccccaccgacuacuggauccugaucaccagcaacaccaacggcgugguguacgagagcaccaacaacagcgacuucuggaccgccgugaucgccguggagccccacgugaaccccguggacagacaguacaacguguucggcgagaacaagcaguucaacgugagaaacgacagcgacaaguggaaguuccuggagauguucagaggcagcagccagaacgacuucuacaacagaagaacccugaccagcgacaccagacuggugggcauccugaaguacggcggcagaguguggaccuuccacggcgagacccccagagccaccaccgacagcagcaacaccgccaaccuggacggcaucagcaucaccauccacagcgaguucuacaucauccccagaagccaggagagcaagugcaacgaguacaucaacaacggccugagcggcggcgacaucaucaagcugcugaacgagcaggugaacaaggagaugcagagcagcaaccuguacaugagcaugagcagcuggugcuacacccacagccuggacggcgccggccuguuccuguucgaccacgccgccgaggaguacgagcacgccaagaagcugaucaucuuccugaacgagaacaacgugcccgugcagcugaccagcaucagcgcccccgagcacaaguucgagggccugacccagaucuuccagaaggccuacgagcacgagcagcacaucagcgagagcaucaacaacaucguggaccacgccaucaagagcaaggaccacgccaccuucaacuuccugcagugguacguggccgagcagcacgaggaggaggugcuguucaaggacauccuggacaagaucgagcugaucggcaacgagaaccacggccuguaccuggccgaccaguacgugaagggcaucgccaagagcagaaagagcugaggacuagucccuguucccagagcccacuuuuuuuucuuuuuuugaaauaaaauagccugucuuucagaucuaaaaaaaaaaaaaaaaaaaaaaaaaaaaaaaaaaaaaaaaaaaaaaaaaaaaaaaaaaaaaaaaaaaaaaaaaaaaaaaaaaaaaaaaaaaaaaaaaaaa

SEQ ID NO: 763 - RNA, 1361 nt, Artificial Sequence
  mRNA product Design a-1 (A100) comprising derived and/or modified sequence from RVA/Wa-VirWa/P[8]__ACR22783.1__P2_VP8*(41-223)_Ferritin (opt4)
aggagagucccgcagucggcguccagcggcucugcuuguucgugugugugucguugcaggccuuauucaagcuuaccaugcaguacaucaaggccaacagcaaguucaucggcaucaccgagcugggcagcggcagcggcgcccagaccagauacgcccccgugaacuggggccacggcgagaucaacgacagcaccaccguggagcccauccuggacggccccuaccagcccaccaccuucaccccccccaacgacuacuggauccugaucaacagcaacaccaacggcgugguguacgagagcaccaacaacagcgacuucuggaccgccgugguggccaucgagccccacgugaaccccguggacagacaguacaccaucuucggcgagagcaagcaguucaacgugagaaacgacagcaacaaguggaaguuccuggagauguucagaagcagcagccagaacgaguucuacaacagaagaacccugaccagcgacaccagacuggugggcauccugaaguacggcggcagaguguggaccuuccacggcgagacccccagagccaccaccgacagcagcagcaccgccaaccugaacaacaucagcaucaccauccacagcgaguucuacaucauccccagaagccaggagagcaagugcaacgaguacaucaacaacggccugagcggcggcgacaucaucaagcugcugaacgagcaggugaacaaggagaugcagagcagcaaccuguacaugagcaugagcagcuggugcuacacccacagccuggacggcgccggccuguuccuguucgaccacgccgccgaggaguacgagcacgccaagaagcugaucaucuuccugaacgagaacaacgugcccgugcagcugaccagcaucagcgcccccgagcacaaguucgagggccugacccagaucuuccagaaggccuacgagcacgagcagcacaucagcgagagcaucaacaacaucguggaccacgccaucaagagcaaggaccacgccaccuucaacuuccugcagugguacguggccgagcagcacgaggaggaggugcuguucaaggacauccuggacaagaucgagcugaucggcaacgagaaccacggccuguaccuggccgaccaguacgugaagggcaucgccaagagcagaaagagcugaggacuagucccuguucccagagcccacuuuuuuuucuuuuuuugaaauaaaauagccugucuuucagaucuaaaaaaaaaaaaaaaaaaaaaaaaaaaaaaaaaaaaaaaaaaaaaaaaaaaaaaaaaaaaaaaaaaaaaaaaaaaaaaaaaaaaaaaaaaaaaaaaaaaa

SEQ ID NO: 764 - RNA, 1361 nt, Artificial Sequence
  mRNA product Design a-1 (A100) comprising derived and/or modified sequence from RVA/Wa/P[8]__AAA47290.1__P2_VP8*(41-223)_Ferritin (opt4)
aggagagucccgcagucggcguccagcggcucugcuuguucgugugugugucguugcaggccuuauucaagcuuaccaugcaguacaucaaggccaacagcaaguucaucggcaucaccgagcugggcagcggcagcggcgcccagaccagauacgcccccgugaacuggggccacggcgagaucaacgacagcaccaccguggagcccauccuggacggccccuaccagcccaccaccuucaccccccccaacgacuacuggauccugaucaacagcaacaccaacggcgugguguacgagagcaccaacaacagcgacuucuggaccgccgugguggccaucgagccccacgugaaccccguggacagacaguacaccaucuucggcgagagcaagcaguucaacgugagcaacgacagcaacaaguggaaguuccuggagauguucagaagcagcagccagaacgaguucuacaacagaagaacccugaccagcgacaccagauucgugggcauccugaaguacggcggcagaguguggaccuuccacggcgagacccccagagccaccaccgacagcagcagcaccgccaaccugaacaacaucagcaucaccauccacagcgaguucuacaucauccccagaagccaggagagcaagugcaacgaguacaucaacaacggccugagcggcggcgacaucaucaagcugcugaacgagcaggugaacaaggagaugcagagcagcaaccuguacaugagcaugagcagcuggugcuacacccacagccuggacggcgccggccuguuccuguucgaccacgccgccgaggaguacgagcacgccaagaagcugaucaucuuccugaacgagaacaacgugcccgugcagcugaccagcaucagcgcccccgagcacaaguucgagggccugacccagaucuuccagaaggccuacgagcacgagcagcacaucagcgagagcaucaacaacaucguggaccacgccaucaagagcaaggaccacgccaccuucaacuuccugcagugguacguggccgagcagcacgaggaggaggugcuguucaaggacauccuggacaagaucgagcugaucggcaacgagaaccacggccuguaccuggccgaccaguacgugaagggcaucgccaagagcagaaagagcugaggacuagucccuguucccagagcccacuuuuuuuucuuuuuuugaaauaaaauagccugucuuucagaucuaaaaaaaaaaaaaaaaaaaaaaaaaaaaaaaaaaaaaaaaaaaaaaaaaaaaaaaaaaaaaaaaaaaaaaaaaaaaaaaaaaaaaaaaaaaaaaaaaaaa

SEQ ID NO: 765 - RNA, 1361 nt, Artificial Sequence
  mRNA product Design a-1 (A100) comprising derived and/or modified sequence from RVA/Wa/P[8]__AAA66953.1__P2_VP8*(41-223)_Ferritin (opt4)
aggagagucccgcagucggcguccagcggcucugcuuguucgugugugugucguugcaggccuuauucaagcuuaccaugcaguacaucaaggccaacagcaaguucaucggcaucaccgagcugggcagcggcagcggcgcccagaccagauacgcccccgugaacuggggccacggcgagaucaacgacagcaccaccguggagcccaugcuggacggccccuaccagcccaccaccuucaccccccccaacgacuacuggauccugaucaacagcaacaccaacggcgugguguacgagagcaccaacaacagcgacuucuggaccgccgugguggccaucgagccccacgugaaccccguggacagacaguacaccaucuucggcgagagcaagcaguucaacgugagcaacgacagcaacaaguggaaguuccuggagauguucagaagcagcagccagaacgaguucuacaacagaagaacccugaccagcgacaccagauucgugggcauccugaaguacggcggcagaguguggaccuuccacggcgagacccccagagccaccaccgacagcagcagcaccgccaaccugaacaacaucagcaucaccauccacagcgaguucuacaucauccccagaagccaggagagcaagugcaacgaguacaucaacaacggccugagcggcggcgacaucaucaagcugcugaacgagcaggugaacaaggagaugcagagcagcaaccuguacaugagcaugagcagcuggugcuacacccacagccuggacggcgccggccuguuccuguucgaccacgccgccgaggaguacgagcacgccaagaagcugaucaucuuccugaacgagaacaacgugcccgugcagcugaccagcaucagcgcccccgagcacaaguucgagggccugacccagaucuuccagaaggccuacgagcacgagcagcacaucagcgagagcaucaacaacaucguggaccacgccaucaagagcaaggaccacgccaccuucaacuuccugcagugguacguggccgagcagcacgaggaggaggugcuguucaaggacauccuggacaagaucgagcugaucggcaacgagaaccacggccuguaccuggccgaccaguacgugaagggcaucgccaagagcagaaagagcugaggacuagucccuguucccagagcccacuuuuuuuucuuuuuuugaaauaaaauagccugucuuucagaucuaaaaaaaaaaaaaaaaaaaaaaaaaaaaaaaaaaaaaaaaaaaaaaaaaaaaaaaaaaaaaaaaaaaaaaaaaaaaaaaaaaaaaaaaaaaaaaaaaaaa

SEQ ID NO: 766 - RNA, 1295 nt, Artificial Sequence
  mRNA product Design a-1 (A100) comprising derived and/or modified sequence from RVA/BE1058/P[4]__AEX30665.1__LumSynt_P2_VP8*(65-223) (opt4)
aggagagucccgcagucggcguccagcggcucugcuuguucgugugugugucguugcaggccuuauucaagcuuaccaugcagaucuacgagggcaagcugaccgccgagggccugagauucggcaucguggccagcagauucaaccacgcccugguggacagacugguggagggcgccaucgacgccaucgugagacacggcggcagagaggaggacaucacccuggugagagugcccggcagcugggagauccccguggccgccggcgagcuggccagaaaggaggacaucgacgccgugaucgccaucggcgugcugaucagaggcgccaccccccacuucgacuacaucgccagcgaggugagcaagggccuggccgaccugagccuggagcugagaaagcccaucaccuucggcgugaucaccgccgacacccuggagcaggccaucgagagagccggcaccaagcacggcaacaagggcugggaggccgcccugagcgccaucgagauggccaaccuguucaagagccugagaggcggcagcggcggcagcggcggcagcggcggcagcggcggcggccaguacaucaaggccaacagcaaguucaucggcaucaccgagcugggcagcggcagcggccuggacggccccuaccagcccaccaccuucaagccccccaacgacuacuggcugcugaucagcagcaacaccgacggcgugguguacgagagcaccaacaacagcgacuucuggaccgccgugaucgccguggagccccacgugaaccagaccaacagacaguacgugcuguucggcgagaacaagcaguucaacaucgagaacagcagcgacaaguggaaguucuucgagauguucaagggcaacagccagagcgacuucagcaacagaagaacccugaccagcagcaacagacuggugggcaugcugaaguacggcggcagaguguggaccuuccacggcgagacccccagagccaccaccgacagcagcagcaccgccgaccugaacaacaucagcaucaucauccacagcgaguucuacaucauccccagaagccaggagagcaagugcaacgaguacaucaacaacggccugugaggacuagucccuguucccagagcccacuuuuuuuucuuuuuuugaaauaaaauagccugucuuucagaucuaaaaaaaaaaaaaaaaaaaaaaaaaaaaaaaaaaaaaaaaaaaaaaaaaaaaaaaaaaaaaaaaaaaaaaaaaaaaaaaaaaaaaaaaaaaaaaaaaaaa

SEQ ID NO: 767 - RNA, 1295 nt, Artificial Sequence
  mRNA product Design a-1 (A100) comprising derived and/or modified sequence from RVA/DS-1/P[4]__CAD62680.1__LumSynt_P2_VP8*(65-223) (opt4)
aggagagucccgcagucggcguccagcggcucugcuuguucgugugugugucguugcaggccuuauucaagcuuaccaugcagaucuacgagggcaagcugaccgccgagggccugagauucggcaucguggccagcagauucaaccacgcccugguggacagacugguggagggcgccaucgacgccaucgugagacacggcggcagagaggaggacaucacccuggugagagugcccggcagcugggagauccccguggccgccggcgagcuggccagaaaggaggacaucgacgccgugaucgccaucggcgugcugaucagaggcgccaccccccacuucgacuacaucgccagcgaggugagcaagggccuggccgaccugagccuggagcugagaaagcccaucaccuucggcgugaucaccgccgacacccuggagcaggccaucgagagagccggcaccaagcacggcaacaagggcugggaggccgcccugagcgccaucgagauggccaaccuguucaagagccugagaggcggcagcggcggcagcggcggcagcggcggcagcggcggcggccaguacaucaaggccaacagcaaguucaucggcaucaccgagcugggcagcggcagcggccuggacggccccuaccagcccaccaccuucaagccccccaacgacuacuggcugcugaucagcagcaacaccaacggcgugguguacgagagcaccaacaacaacgacuucuggaccgccgugagcagcguggagccccacgugagccagaccaacagacaguacauccuguucggcgagaacaagcaguucaacguggagaacaacagcgacaaguggaaguucuucgagaccuucaccggcagcagccagggcaacuucagcaacagaagaacccugaccagcagcaacagacuggugggcaugcugaaguacggcggcagaguguggaccuuccacggcgagacccccagagccaccaccgacagcagcaacaccgccgaccugaacaacaucagcaucaucauccacagcgaguucuacaucauccccagaagccaggagagcaagugcaacgaguacaucaacaacggccugugaggacuagucccuguucccagagcccacuuuuuuuucuuuuuuugaaauaaaauagccugucuuucagaucuaaaaaaaaaaaaaaaaaaaaaaaaaaaaaaaaaaaaaaaaaaaaaaaaaaaaaaaaaaaaaaaaaaaaaaaaaaaaaaaaaaaaaaaaaaaaaaaaaaaa

SEQ ID NO: 768 - RNA, 1295 nt, Artificial Sequence; identical to SEQ ID NO: 767
  mRNA product Design a-1 (A100) comprising derived and/or modified sequence from RVA/DS-1/P[4]__ABV53252.1__LumSynt_P2_VP8*(65-223) (opt4)

SEQ ID NO: 769 - RNA, 1295 nt, Artificial Sequence
  mRNA product Design a-1 (A100) comprising derived and/or modified sequence from RVA/F01322/P[6]__AFA51886.1__LumSynt_P2_VP8*(65-223) (opt4)
aggagagucccgcagucggcguccagcggcucugcuuguucgugugugugucguugcaggccuuauucaagcuuaccaugcagaucuacgagggcaagcugaccgccgagggccugagauucggcaucguggccagcagauucaaccacgcccugguggacagacugguggagggcgccaucgacgccaucgugagacacggcggcagagaggaggacaucacccuggugagagugcccggcagcugggagauccccguggccgccggcgagcuggccagaaaggaggacaucgacgccgugaucgccaucggcgugcugaucagaggcgccaccccccacuucgacuacaucgccagcgaggugagcaagggccuggccgaccugagccuggagcugagaaagcccaucaccuucggcgugaucaccgccgacacccuggagcaggccaucgagagagccggcaccaagcacggcaacaagggcugggaggccgcccugagcgccaucgagauggccaaccuguucaagagccugagaggcggcagcggcggcagcggcggcagcggcggcagcggcggcggccaguacaucaaggccaacagcaaguucaucggcaucaccgagcugggcagcggcagcggccuggacggccccuaccagcccaccaacuucaagccccccaacgacuacuggauccugcugaaccccaccaaccagcagguggugcuggagggcaccaacaagaccgacaucuggguggcccugcugcugguggagcccaacgugaccaaccagagcagacaguacacccuguucggcgagaccaagcagaucaccguggagaacaacaccaacaaguggaaguucuucgagauguucagaagcagcgugagcgccgaguuccagcacaagagaacccugaccagcgacaccaagcuggccggcuucaugaaguucuacaacagcguguggaccuuccacggcgagacccccaacgccaccaccgacuacagcagcaccagcaaccuguucgagguggagaccgugauccacguggaguucuacaucauccccagaagccaggagagcaagugcagcgaguacaucaacaccggccugugaggacuagucccuguucccagagcccacuuuuuuuucuuuuuuugaaauaaaauagccugucuuucagaucuaaaaaaaaaaaaaaaaaaaaaaaaaaaaaaaaaaaaaaaaaaaaaaaaaaaaaaaaaaaaaaaaaaaaaaaaaaaaaaaaaaaaaaaaaaaaaaaaaaaa

SEQ ID NO: 770 - RNA, 1295 nt, Artificial Sequence
  mRNA product Design a-1 (A100) comprising derived and/or modified sequence from RVA/1076/P[6]__AAA47337.1__LumSynt_P2_VP8*(65-223) (opt4)
aggagagucccgcagucggcguccagcggcucugcuuguucgugugugugucguugcaggccuuauucaagcuuaccaugcagaucuacgagggcaagcugaccgccgagggccugagauucggcaucguggccagcagauucaaccacgcccugguggacagacugguggagggcgccaucgacgccaucgugagacacggcggcagagaggaggacaucacccuggugagagugcccggcagcugggagauccccguggccgccggcgagcuggccagaaaggaggacaucgacgccgugaucgccaucggcgugcugaucagaggcgccaccccccacuucgacuacaucgccagcgaggugagcaagggccuggccgaccugagccuggagcugagaaagcccaucaccuucggcgugaucaccgccgacacccuggagcaggccaucgagagagccggcaccaagcacggcaacaagggcugggaggccgcccugagcgccaucgagauggccaaccuguucaagagccugagaggcggcagcggcggcagcggcggcagcggcggcagcggcggcggccaguacaucaaggccaacagcaaguucaucggcaucaccgagcugggcagcggcagcggccuggacggccccuaccagcccaccagcuucaagccccccagcgacuacuggauccugcugaaccccaccaaccagcagguggugcuggagggcaccaacaagaccgacaucuggguggcccugcugcugguggagcccaacgugaccaaccagagcagacaguacacccuguucggcgagaccaagcagaucaccguggagaacaacaccaacaaguggaaguucuucgagauguucagaagcagcgugagcgccgaguuccagcacaagagaacccugaccagcgacaccaagcuggccggcuuccugaaguucuacaacagcguguggaccuucuacggcgagaccccccacgccaccaccgacuacagcagcaccagcaaccugagcgagguggagaccgccauccacguggaguucuacaucauccccagaagccaggagagcaagugcaacgaguacaucaacaccggccugugaggacuagucccuguucccagagcccacuuuuuuuucuuuuuuugaaauaaaauagccugucuuucagaucuaaaaaaaaaaaaaaaaaaaaaaaaaaaaaaaaaaaaaaaaaaaaaaaaaaaaaaaaaaaaaaaaaaaaaaaaaaaaaaaaaaaaaaaaaaaaaaaaaaaa

SEQ ID NO: 771 - RNA, 1295 nt, Artificial Sequence
  mRNA product Design a-1 (A100) comprising derived and/or modified sequence from RVA/BE1128/P[8]__AEX30671.1__LumSynt_P2_VP8*(65-223) (opt4)
aggagagucccgcagucggcguccagcggcucugcuuguucgugugugugucguugcaggccuuauucaagcuuaccaugcagaucuacgagggcaagcugaccgccgagggccugagauucggcaucguggccagcagauucaaccacgcccugguggacagacugguggagggcgccaucgacgccaucgugagacacggcggcagagaggaggacaucacccuggugagagugcccggcagcugggagauccccguggccgccggcgagcuggccagaaaggaggacaucgacgccgugaucgccaucggcgugcugaucagaggcgccaccccccacuucgacuacaucgccagcgaggugagcaagggccuggccgaccugagccuggagcugagaaagcccaucaccuucggcgugaucaccgccgacacccuggagcaggccaucgagagagccggcaccaagcacggcaacaagggcugggaggccgcccugagcgccaucgagauggccaaccuguucaagagccugagaggcggcagcggcggcagcggcggcagcggcggcagcggcggcggccaguacaucaaggccaacagcaaguucaucggcaucaccgagcugggcagcggcagcggccuggacggccccuaccagcccaccaccuucaccccccccaccgacuacuggauccugaucaccagcaacaccaacggcgugguguacgagagcaccaacaacagcgacuucuggaccgccgugaucgccguggagccccacgugaaccccguggacagacaguacaacguguucggcgagaacaagcaguucaacgugagaaacgacagcgacaaguggaaguuccuggagauguucagaggcagcagccagaacgacuucuacaacagaagaacccugaccagcgacaccagacuggugggcauccugaaguacggcggcagaguguggaccuuccacggcgagacccccagagccaccaccgacagcagcaacaccgccaaccuggacggcaucagcaucaccauccacagcgaguucuacaucauccccagaagccaggagagcaagugcaacgaguacaucaacaacggccugugaggacuagucccuguucccagagcccacuuuuuuuucuuuuuuugaaauaaaauagccugucuuucagaucuaaaaaaaaaaaaaaaaaaaaaaaaaaaaaaaaaaaaaaaaaaaaaaaaaaaaaaaaaaaaaaaaaaaaaaaaaaaaaaaaaaaaaaaaaaaaaaaaaaaa

SEQ ID NO: 772 - RNA, 1295 nt, Artificial Sequence
  mRNA product Design a-1 (A100) comprising derived and/or modified sequence from RVA/Wa-VirWa/P[8]__ACR22783.1__LumSynt_P2_VP8*(65-223) (opt4)
aggagagucccgcagucggcguccagcggcucugcuuguucgugugugugucguugcaggccuuauucaagcuuaccaugcagaucuacgagggcaagcugaccgccgagggccugagauucggcaucguggccagcagauucaaccacgcccugguggacagacugguggagggcgccaucgacgccaucgugagacacggcggcagagaggaggacaucacccuggugagagugcccggcagcugggagauccccguggccgccggcgagcuggccagaaaggaggacaucgacgccgugaucgccaucggcgugcugaucagaggcgccaccccccacuucgacuacaucgccagcgaggugagcaagggccuggccgaccugagccuggagcugagaaagcccaucaccuucggcgugaucaccgccgacacccuggagcaggccaucgagagagccggcaccaagcacggcaacaagggcugggaggccgcccugagcgccaucgagauggccaaccuguucaagagccugagaggcggcagcggcggcagcggcggcagcggcggcagcggcggcggccaguacaucaaggccaacagcaaguucaucggcaucaccgagcugggcagcggcagcggccuggacggccccuaccagcccaccaccuucaccccccccaacgacuacuggauccugaucaacagcaacaccaacggcgugguguacgagagcaccaacaacagcgacuucuggaccgccgugguggccaucgagccccacgugaaccccguggacagacaguacaccaucuucggcgagagcaagcaguucaacgugagaaacgacagcaacaaguggaaguuccuggagauguucagaagcagcagccagaacgaguucuacaacagaagaacccugaccagcgacaccagacuggugggcauccugaaguacggcggcagaguguggaccuuccacggcgagacccccagagccaccaccgacagcagcagcaccgccaaccugaacaacaucagcaucaccauccacagcgaguucuacaucauccccagaagccaggagagcaagugcaacgaguacaucaacaacggccugugaggacuagucccuguucccagagcccacuuuuuuuucuuuuuuugaaauaaaauagccugucuuucagaucuaaaaaaaaaaaaaaaaaaaaaaaaaaaaaaaaaaaaaaaaaaaaaaaaaaaaaaaaaaaaaaaaaaaaaaaaaaaaaaaaaaaaaaaaaaaaaaaaaaaa

SEQ ID NO: 773 - RNA, 1295 nt, Artificial Sequence
  mRNA product Design a-1 (A100) comprising derived and/or modified sequence from RVA/Wa/P[8]__AAA47290.1__LumSynt_P2_VP8*(65-223) (opt4)
aggagagucccgcagucggcguccagcggcucugcuuguucgugugugugucguugcaggccuuauucaagcuuaccaugcagaucuacgagggcaagcugaccgccgagggccugagauucggcaucguggccagcagauucaaccacgcccugguggacagacugguggagggcgccaucgacgccaucgugagacacggcggcagagaggaggacaucacccuggugagagugcccggcagcugggagauccccguggccgccggcgagcuggccagaaaggaggacaucgacgccgugaucgccaucggcgugcugaucagaggcgccaccccccacuucgacuacaucgccagcgaggugagcaagggccuggccgaccugagccuggagcugagaaagcccaucaccuucggcgugaucaccgccgacacccuggagcaggccaucgagagagccggcaccaagcacggcaacaagggcugggaggccgcccugagcgccaucgagauggccaaccuguucaagagccugagaggcggcagcggcggcagcggcggcagcggcggcagcggcggcggccaguacaucaaggccaacagcaaguucaucggcaucaccgagcugggcagcggcagcggccuggacggccccuaccagcccaccaccuucaccccccccaacgacuacuggauccugaucaacagcaacaccaacggcgugguguacgagagcaccaacaacagcgacuucuggaccgccgugguggccaucgagccccacgugaaccccguggacagacaguacaccaucuucggcgagagcaagcaguucaacgugagcaacgacagcaacaaguggaaguuccuggagauguucagaagcagcagccagaacgaguucuacaacagaagaacccugaccagcgacaccagauucgugggcauccugaaguacggcggcagaguguggaccuuccacggcgagacccccagagccaccaccgacagcagcagcaccgccaaccugaacaacaucagcaucaccauccacagcgaguucuacaucauccccagaagccaggagagcaagugcaacgaguacaucaacaacggccugugaggacuagucccuguucccagagcccacuuuuuuuucuuuuuuugaaauaaaauagccugucuuucagaucuaaaaaaaaaaaaaaaaaaaaaaaaaaaaaaaaaaaaaaaaaaaaaaaaaaaaaaaaaaaaaaaaaaaaaaaaaaaaaaaaaaaaaaaaaaaaaaaaaaaa

SEQ ID NO: 774 - RNA, 1295 nt, Artificial Sequence; identical to SEQ ID NO: 773
  mRNA product Design a-1 (A100) comprising derived and/or modified sequence from RVA/Wa/P[8]__AAA66953.1__LumSynt_P2_VP8*(65-223) (opt4)

SEQ ID NO: 775 - RNA, 1367 nt, Artificial Sequence
  mRNA product Design a-1 (A100) comprising derived and/or modified sequence from RVA/BE1058/P[4]__AEX30665.1__LumSynt_P2_VP8*(41-223) (opt4)
aggagagucccgcagucggcguccagcggcucugcuuguucgugugugugucguugcaggccuuauucaagcuuaccaugcagaucuacgagggcaagcugaccgccgagggccugagauucggcaucguggccagcagauucaaccacgcccugguggacagacugguggagggcgccaucgacgccaucgugagacacggcggcagagaggaggacaucacccuggugagagugcccggcagcugggagauccccguggccgccggcgagcuggccagaaaggaggacaucgacgccgugaucgccaucggcgugcugaucagaggcgccaccccccacuucgacuacaucgccagcgaggugagcaagggccuggccgaccugagccuggagcugagaaagcccaucaccuucggcgugaucaccgccgacacccuggagcaggccaucgagagagccggcaccaagcacggcaacaagggcugggaggccgcccugagcgccaucgagauggccaaccuguucaagagccugagaggcggcagcggcggcagcggcggcagcggcggcagcggcggcggccaguacaucaaggccaacagcaaguucaucggcaucaccgagcugggcagcggcagcggcgcccagaccagauacgcccccgugaacuggggccacggcgagaucaacgacagcaccaccguggagcccgugcuggacggccccuaccagcccaccaccuucaagccccccaacgacuacuggcugcugaucagcagcaacaccgacggcgugguguacgagagcaccaacaacagcgacuucuggaccgccgugaucgccguggagccccacgugaaccagaccaacagacaguacgugcuguucggcgagaacaagcaguucaacaucgagaacagcagcgacaaguggaaguucuucgagauguucaagggcaacagccagagcgacuucagcaacagaagaacccugaccagcagcaacagacuggugggcaugcugaaguacggcggcagaguguggaccuuccacggcgagacccccagagccaccaccgacagcagcagcaccgccgaccugaacaacaucagcaucaucauccacagcgaguucuacaucauccccagaagccaggagagcaagugcaacgaguacaucaacaacggccugugaggacuagucccuguucccagagcccacuuuuuuuucuuuuuuugaaauaaaauagccugucuuucagaucuaaaaaaaaaaaaaaaaaaaaaaaaaaaaaaaaaaaaaaaaaaaaaaaaaaaaaaaaaaaaaaaaaaaaaaaaaaaaaaaaaaaaaaaaaaaaaaaaaaaa

SEQ ID NO: 776 - RNA, 1367 nt, Artificial Sequence
  mRNA product Design a-1 (A100) comprising derived and/or modified sequence from RVA/DS-1/P[4]__CAD62680.1__LumSynt_P2_VP8*(41-223) (opt4)
aggagagucccgcagucggcguccagcggcucugcuuguucgugugugugucguugcaggccuuauucaagcuuaccaugcagaucuacgagggcaagcugaccgccgagggccugagauucggcaucguggccagcagauucaaccacgcccugguggacagacugguggagggcgccaucgacgccaucgugagacacggcggcagagaggaggacaucacccuggugagagugcccggcagcugggagauccccguggccgccggcgagcuggccagaaaggaggacaucgacgccgugaucgccaucggcgugcugaucagaggcgccaccccccacuucgacuacaucgccagcgaggugagcaagggccuggccgaccugagccuggagcugagaaagcccaucaccuucggcgugaucaccgccgacacccuggagcaggccaucgagagagccggcaccaagcacggcaacaagggcugggaggccgcccugagcgccaucgagauggccaaccuguucaagagccugagaggcggcagcggcggcagcggcggcagcggcggcagcggcggcggccaguacaucaaggccaacagcaaguucaucggcaucaccgagcugggcagcggcagcggcgcccagaccagauacgcccccgugaacuggggcagcugggagaucaacgacagcaccaccguggagcccgugcuggacggccccuaccagcccaccaccuucaagccccccaacgacuacuggcugcugaucagcagcaacaccaacggcgugguguacgagagcaccaacaacaacgacuucuggaccgccgugagcagcguggagccccacgugagccagaccaacagacaguacauccuguucggcgagaacaagcaguucaacguggagaacaacagcgacaaguggaaguucuucgagaccuucaccggcagcagccagggcaacuucagcaacagaagaacccugaccagcagcaacagacuggugggcaugcugaaguacggcggcagaguguggaccuuccacggcgagacccccagagccaccaccgacagcagcaacaccgccgaccugaacaacaucagcaucaucauccacagcgaguucuacaucauccccagaagccaggagagcaagugcaacgaguacaucaacaacggccugugaggacuagucccuguucccagagcccacuuuuuuuucuuuuuuugaaauaaaauagccugucuuucagaucuaaaaaaaaaaaaaaaaaaaaaaaaaaaaaaaaaaaaaaaaaaaaaaaaaaaaaaaaaaaaaaaaaaaaaaaaaaaaaaaaaaaaaaaaaaaaaaaaaaaa

SEQ ID NO: 777 - RNA, 1367 nt, Artificial Sequence; identical to SEQ ID NO: 776
  mRNA product Design a-1 (A100) comprising derived and/or modified sequence from RVA/DS-1/P[4]__ABV53252.1__LumSynt_P2_VP8*(41-223) (opt4)

SEQ ID NO: 778 - RNA, 1367 nt, Artificial Sequence
  mRNA product Design a-1 (A100) comprising derived and/or modified sequence from RVA/F01322/P[6]__AFA51886.1__LumSynt_P2_VP8*(41-223) (opt4)
aggagagucccgcagucggcguccagcggcucugcuuguucgugugugugucguugcaggccuuauucaagcuuaccaugcagaucuacgagggcaagcugaccgccgagggccugagauucggcaucguggccagcagauucaaccacgcccugguggacagacugguggagggcgccaucgacgccaucgugagacacggcggcagagaggaggacaucacccuggugagagugcccggcagcugggagauccccguggccgccggcgagcuggccagaaaggaggacaucgacgccgugaucgccaucggcgugcugaucagaggcgccaccccccacuucgacuacaucgccagcgaggugagcaagggccuggccgaccugagccuggagcugagaaagcccaucaccuucggcgugaucaccgccgacacccuggagcaggccaucgagagagccggcaccaagcacggcaacaagggcugggaggccgcccugagcgccaucgagauggccaaccuguucaagagccugagaggcggcagcggcggcagcggcggcagcggcggcagcggcggcggccaguacaucaaggccaacagcaaguucaucggcaucaccgagcugggcagcggcagcggcgcccagaccaacuacgcccccgugaccuggagccacggcgaggugaacgacagcaccaccaucgagcccgugcuggacggccccuaccagcccaccaacuucaagccccccaacgacuacuggauccugcugaaccccaccaaccagcagguggugcuggagggcaccaacaagaccgacaucuggguggcccugcugcugguggagcccaacgugaccaaccagagcagacaguacacccuguucggcgagaccaagcagaucaccguggagaacaacaccaacaaguggaaguucuucgagauguucagaagcagcgugagcgccgaguuccagcacaagagaacccugaccagcgacaccaagcuggccggcuucaugaaguucuacaacagcguguggaccuuccacggcgagacccccaacgccaccaccgacuacagcagcaccagcaaccuguucgagguggagaccgugauccacguggaguucuacaucauccccagaagccaggagagcaagugcagcgaguacaucaacaccggccugugaggacuagucccuguucccagagcccacuuuuuuuucuuuuuuugaaauaaaauagccugucuuucagaucuaaaaaaaaaaaaaaaaaaaaaaaaaaaaaaaaaaaaaaaaaaaaaaaaaaaaaaaaaaaaaaaaaaaaaaaaaaaaaaaaaaaaaaaaaaaaaaaaaaaa

SEQ ID NO: 779 - RNA, 1367 nt, Artificial Sequence
  mRNA product Design a-1 (A100) comprising derived and/or modified sequence from RVA/1076/P[6]__AAA47337.1__LumSynt_P2_VP8*(41-223) (opt4)
aggagagucccgcagucggcguccagcggcucugcuuguucgugugugugucguugcaggccuuauucaagcuuaccaugcagaucuacgagggcaagcugaccgccgagggccugagauucggcaucguggccagcagauucaaccacgcccugguggacagacugguggagggcgccaucgacgccaucgugagacacggcggcagagaggaggacaucacccuggugagagugcccggcagcugggagauccccguggccgccggcgagcuggccagaaaggaggacaucgacgccgugaucgccaucggcgugcugaucagaggcgccaccccccacuucgacuacaucgccagcgaggugagcaagggccuggccgaccugagccuggagcugagaaagcccaucaccuucggcgugaucaccgccgacacccuggagcaggccaucgagagagccggcaccaagcacggcaacaagggcugggaggccgcccugagcgccaucgagauggccaaccuguucaagagccugagaggcggcagcggcggcagcggcggcagcggcggcagcggcggcggccaguacaucaaggccaacagcaaguucaucggcaucaccgagcugggcagcggcagcggcgcccagaccaacuacgcccccgugaccuggagccacggcgaggugaacgacagcaccaccaucgagcccgugcuggacggccccuaccagcccaccagcuucaagccccccagcgacuacuggauccugcugaaccccaccaaccagcagguggugcuggagggcaccaacaagaccgacaucuggguggcccugcugcugguggagcccaacgugaccaaccagagcagacaguacacccuguucggcgagaccaagcagaucaccguggagaacaacaccaacaaguggaaguucuucgagauguucagaagcagcgugagcgccgaguuccagcacaagagaacccugaccagcgacaccaagcuggccggcuuccugaaguucuacaacagcguguggaccuucuacggcgagaccccccacgccaccaccgacuacagcagcaccagcaaccugagcgagguggagaccgccauccacguggaguucuacaucauccccagaagccaggagagcaagugcaacgaguacaucaacaccggccugugaggacuagucccuguucccagagcccacuuuuuuuucuuuuuuugaaauaaaauagccugucuuucagaucuaaaaaaaaaaaaaaaaaaaaaaaaaaaaaaaaaaaaaaaaaaaaaaaaaaaaaaaaaaaaaaaaaaaaaaaaaaaaaaaaaaaaaaaaaaaaaaaaaaaa

SEQ ID NO: 780 - RNA, 1367 nt, Artificial Sequence
  mRNA product Design a-1 (A100) comprising derived and/or modified sequence from RVA/BE1128/P[8]__AEX30671.1__LumSynt_P2_VP8*(41-223) (opt4)
aggagagucccgcagucggcguccagcggcucugcuuguucgugugugugucguugcaggccuuauucaagcuuaccaugcagaucuacgagggcaagcugaccgccgagggccugagauucggcaucguggccagcagauucaaccacgcccugguggacagacugguggagggcgccaucgacgccaucgugagacacggcggcagagaggaggacaucacccuggugagagugcccggcagcugggagauccccguggccgccggcgagcuggccagaaaggaggacaucgacgccgugaucgccaucggcgugcugaucagaggcgccaccccccacuucgacuacaucgccagcgaggugagcaagggccuggccgaccugagccuggagcugagaaagcccaucaccuucggcgugaucaccgccgacacccuggagcaggccaucgagagagccggcaccaagcacggcaacaagggcugggaggccgcccugagcgccaucgagauggccaaccuguucaagagccugagaggcggcagcggcggcagcggcggcagcggcggcagcggcggcggccaguacaucaaggccaacagcaaguucaucggcaucaccgagcugggcagcggcagcggcgcccagaccagauacgcccccgugaacuggggccacggcgagaucaacgacagcaccaccguggagcccauccuggacggccccuaccagcccaccaccuucaccccccccaccgacuacuggauccugaucaccagcaacaccaacggcgugguguacgagagcaccaacaacagcgacuucuggaccgccgugaucgccguggagccccacgugaaccccguggacagacaguacaacguguucggcgagaacaagcaguucaacgugagaaacgacagcgacaaguggaaguuccuggagauguucagaggcagcagccagaacgacuucuacaacagaagaacccugaccagcgacaccagacuggugggcauccugaaguacggcggcagaguguggaccuuccacggcgagacccccagagccaccaccgacagcagcaacaccgccaaccuggacggcaucagcaucaccauccacagcgaguucuacaucauccccagaagccaggagagcaagugcaacgaguacaucaacaacggccugugaggacuagucccuguucccagagcccacuuuuuuuucuuuuuuugaaauaaaauagccugucuuucagaucuaaaaaaaaaaaaaaaaaaaaaaaaaaaaaaaaaaaaaaaaaaaaaaaaaaaaaaaaaaaaaaaaaaaaaaaaaaaaaaaaaaaaaaaaaaaaaaaaaaaa

SEQ ID NO: 781 - RNA, 1367 nt, Artificial Sequence
  mRNA product Design a-1 (A100) comprising derived and/or modified sequence from RVA/Wa-VirWa/P[8]__ACR22783.1__LumSynt_P2_VP8*(41-223) (opt4)
aggagagucccgcagucggcguccagcggcucugcuuguucgugugugugucguugcaggccuuauucaagcuuaccaugcagaucuacgagggcaagcugaccgccgagggccugagauucggcaucguggccagcagauucaaccacgcccugguggacagacugguggagggcgccaucgacgccaucgugagacacggcggcagagaggaggacaucacccuggugagagugcccggcagcugggagauccccguggccgccggcgagcuggccagaaaggaggacaucgacgccgugaucgccaucggcgugcugaucagaggcgccaccccccacuucgacuacaucgccagcgaggugagcaagggccuggccgaccugagccuggagcugagaaagcccaucaccuucggcgugaucaccgccgacacccuggagcaggccaucgagagagccggcaccaagcacggcaacaagggcugggaggccgcccugagcgccaucgagauggccaaccuguucaagagccugagaggcggcagcggcggcagcggcggcagcggcggcagcggcggcggccaguacaucaaggccaacagcaaguucaucggcaucaccgagcugggcagcggcagcggcgcccagaccagauacgcccccgugaacuggggccacggcgagaucaacgacagcaccaccguggagcccauccuggacggccccuaccagcccaccaccuucaccccccccaacgacuacuggauccugaucaacagcaacaccaacggcgugguguacgagagcaccaacaacagcgacuucuggaccgccgugguggccaucgagccccacgugaaccccguggacagacaguacaccaucuucggcgagagcaagcaguucaacgugagaaacgacagcaacaaguggaaguuccuggagauguucagaagcagcagccagaacgaguucuacaacagaagaacccugaccagcgacaccagacuggugggcauccugaaguacggcggcagaguguggaccuuccacggcgagacccccagagccaccaccgacagcagcagcaccgccaaccugaacaacaucagcaucaccauccacagcgaguucuacaucauccccagaagccaggagagcaagugcaacgaguacaucaacaacggccugugaggacuagucccuguucccagagcccacuuuuuuuucuuuuuuugaaauaaaauagccugucuuucagaucuaaaaaaaaaaaaaaaaaaaaaaaaaaaaaaaaaaaaaaaaaaaaaaaaaaaaaaaaaaaaaaaaaaaaaaaaaaaaaaaaaaaaaaaaaaaaaaaaaaaa

SEQ ID NO: 782 - RNA, 1367 nt, Artificial Sequence
  mRNA product Design a-1 (A100) comprising derived and/or modified sequence from RVA/Wa/P[8]__AAA47290.1__LumSynt_P2_VP8*(41-223) (opt4)
aggagagucccgcagucggcguccagcggcucugcuuguucgugugugugucguugcaggccuuauucaagcuuaccaugcagaucuacgagggcaagcugaccgccgagggccugagauucggcaucguggccagcagauucaaccacgcccugguggacagacugguggagggcgccaucgacgccaucgugagacacggcggcagagaggaggacaucacccuggugagagugcccggcagcugggagauccccguggccgccggcgagcuggccagaaaggaggacaucgacgccgugaucgccaucggcgugcugaucagaggcgccaccccccacuucgacuacaucgccagcgaggugagcaagggccuggccgaccugagccuggagcugagaaagcccaucaccuucggcgugaucaccgccgacacccuggagcaggccaucgagagagccggcaccaagcacggcaacaagggcugggaggccgcccugagcgccaucgagauggccaaccuguucaagagccugagaggcggcagcggcggcagcggcggcagcggcggcagcggcggcggccaguacaucaaggccaacagcaaguucaucggcaucaccgagcugggcagcggcagcggcgcccagaccagauacgcccccgugaacuggggccacggcgagaucaacgacagcaccaccguggagcccauccuggacggccccuaccagcccaccaccuucaccccccccaacgacuacuggauccugaucaacagcaacaccaacggcgugguguacgagagcaccaacaacagcgacuucuggaccgccgugguggccaucgagccccacgugaaccccguggacagacaguacaccaucuucggcgagagcaagcaguucaacgugagcaacgacagcaacaaguggaaguuccuggagauguucagaagcagcagccagaacgaguucuacaacagaagaacccugaccagcgacaccagauucgugggcauccugaaguacggcggcagaguguggaccuuccacggcgagacccccagagccaccaccgacagcagcagcaccgccaaccugaacaacaucagcaucaccauccacagcgaguucuacaucauccccagaagccaggagagcaagugcaacgaguacaucaacaacggccugugaggacuagucccuguucccagagcccacuuuuuuuucuuuuuuugaaauaaaauagccugucuuucagaucuaaaaaaaaaaaaaaaaaaaaaaaaaaaaaaaaaaaaaaaaaaaaaaaaaaaaaaaaaaaaaaaaaaaaaaaaaaaaaaaaaaaaaaaaaaaaaaaaaaaa

SEQ ID NO: 783 - RNA, 1367 nt, Artificial Sequence
  mRNA product Design a-1 (A100) comprising derived and/or modified sequence from RVA/Wa/P[8]__AAA66953.1__LumSynt_P2_VP8*(41-223) (opt4)
aggagagucccgcagucggcguccagcggcucugcuuguucgugugugugucguugcaggccuuauucaagcuuaccaugcagaucuacgagggcaagcugaccgccgagggccugagauucggcaucguggccagcagauucaaccacgcccugguggacagacugguggagggcgccaucgacgccaucgugagacacggcggcagagaggaggacaucacccuggugagagugcccggcagcugggagauccccguggccgccggcgagcuggccagaaaggaggacaucgacgccgugaucgccaucggcgugcugaucagaggcgccaccccccacuucgacuacaucgccagcgaggugagcaagggccuggccgaccugagccuggagcugagaaagcccaucaccuucggcgugaucaccgccgacacccuggagcaggccaucgagagagccggcaccaagcacggcaacaagggcugggaggccgcccugagcgccaucgagauggccaaccuguucaagagccugagaggcggcagcggcggcagcggcggcagcggcggcagcggcggcggccaguacaucaaggccaacagcaaguucaucggcaucaccgagcugggcagcggcagcggcgcccagaccagauacgcccccgugaacuggggccacggcgagaucaacgacagcaccaccguggagcccaugcuggacggccccuaccagcccaccaccuucaccccccccaacgacuacuggauccugaucaacagcaacaccaacggcgugguguacgagagcaccaacaacagcgacuucuggaccgccgugguggccaucgagccccacgugaaccccguggacagacaguacaccaucuucggcgagagcaagcaguucaacgugagcaacgacagcaacaaguggaaguuccuggagauguucagaagcagcagccagaacgaguucuacaacagaagaacccugaccagcgacaccagauucgugggcauccugaaguacggcggcagaguguggaccuuccacggcgagacccccagagccaccaccgacagcagcagcaccgccaaccugaacaacaucagcaucaccauccacagcgaguucuacaucauccccagaagccaggagagcaagugcaacgaguacaucaacaacggccugugaggacuagucccuguucccagagcccacuuuuuuuucuuuuuuugaaauaaaauagccugucuuucagaucuaaaaaaaaaaaaaaaaaaaaaaaaaaaaaaaaaaaaaaaaaaaaaaaaaaaaaaaaaaaaaaaaaaaaaaaaaaaaaaaaaaaaaaaaaaaaaaaaaaaa

SEQ ID NO: 784 - RNA, 842 nt, Artificial Sequence
  mRNA product Design a-1 (A100) comprising derived and/or modified sequence from RVA/BE1058/P[4]__AEX30665.1__SP-IgE_P2_VP8*(65-223) (opt4)
aggagagucccgcagucggcguccagcggcucugcuuguucgugugugugucguugcaggccuuauucaagcuuaccauggacuggaccuggauccuguuccugguggccgccgccaccagagugcacagccaguacaucaaggccaacagcaaguucaucggcaucaccgagcugggcagcggcagcggccuggacggccccuaccagcccaccaccuucaagccccccaacgacuacuggcugcugaucagcagcaacaccgacggcgugguguacgagagcaccaacaacagcgacuucuggaccgccgugaucgccguggagccccacgugaaccagaccaacagacaguacgugcuguucggcgagaacaagcaguucaacaucgagaacagcagcgacaaguggaaguucuucgagauguucaagggcaacagccagagcgacuucagcaacagaagaacccugaccagcagcaacagacuggugggcaugcugaaguacggcggcagaguguggaccuuccacggcgagacccccagagccaccaccgacagcagcagcaccgccgaccugaacaacaucagcaucaucauccacagcgaguucuacaucauccccagaagccaggagagcaagugcaacgaguacaucaacaacggccugugaggacuagucccuguucccagagcccacuuuuuuuucuuuuuuugaaauaaaauagccugucuuucagaucuaaaaaaaaaaaaaaaaaaaaaaaaaaaaaaaaaaaaaaaaaaaaaaaaaaaaaaaaaaaaaaaaaaaaaaaaaaaaaaaaaaaaaaaaaaaaaaaaaaaa

SEQ ID NO: 785 - RNA, 842 nt, Artificial Sequence
  mRNA product Design a-1 (A100) comprising derived and/or modified sequence from RVA/DS-1/P[4]__CAD62680.1__SP-IgE_P2_VP8*(65-223) (opt4)
aggagagucccgcagucggcguccagcggcucugcuuguucgugugugugucguugcaggccuuauucaagcuuaccauggacuggaccuggauccuguuccugguggccgccgccaccagagugcacagccaguacaucaaggccaacagcaaguucaucggcaucaccgagcugggcagcggcagcggccuggacggccccuaccagcccaccaccuucaagccccccaacgacuacuggcugcugaucagcagcaacaccaacggcgugguguacgagagcaccaacaacaacgacuucuggaccgccgugagcagcguggagccccacgugagccagaccaacagacaguacauccuguucggcgagaacaagcaguucaacguggagaacaacagcgacaaguggaaguucuucgagaccuucaccggcagcagccagggcaacuucagcaacagaagaacccugaccagcagcaacagacuggugggcaugcugaaguacggcggcagaguguggaccuuccacggcgagacccccagagccaccaccgacagcagcaacaccgccgaccugaacaacaucagcaucaucauccacagcgaguucuacaucauccccagaagccaggagagcaagugcaacgaguacaucaacaacggccugugaggacuagucccuguucccagagcccacuuuuuuuucuuuuuuugaaauaaaauagccugucuuucagaucuaaaaaaaaaaaaaaaaaaaaaaaaaaaaaaaaaaaaaaaaaaaaaaaaaaaaaaaaaaaaaaaaaaaaaaaaaaaaaaaaaaaaaaaaaaaaaaaaaaaa

SEQ ID NO: 786 - RNA, 842 nt, Artificial Sequence; identical to SEQ ID NO: 785
  mRNA product Design a-1 (A100) comprising derived and/or modified sequence from RVA/DS-1/P[4]__ABV53252.1__SP-IgE_P2_VP8*(65-223) (opt4)

SEQ ID NO: 787 - RNA, 842 nt, Artificial Sequence
  mRNA product Design a-1 (A100) comprising derived and/or modified sequence from RVA/F01322/P[6]__AFA51886.1__SP-IgE_P2_VP8*(65-223) (opt4)
aggagagucccgcagucggcguccagcggcucugcuuguucgugugugugucguugcaggccuuauucaagcuuaccauggacuggaccuggauccuguuccugguggccgccgccaccagagugcacagccaguacaucaaggccaacagcaaguucaucggcaucaccgagcugggcagcggcagcggccuggacggccccuaccagcccaccaacuucaagccccccaacgacuacuggauccugcugaaccccaccaaccagcagguggugcuggagggcaccaacaagaccgacaucuggguggcccugcugcugguggagcccaacgugaccaaccagagcagacaguacacccuguucggcgagaccaagcagaucaccguggagaacaacaccaacaaguggaaguucuucgagauguucagaagcagcgugagcgccgaguuccagcacaagagaacccugaccagcgacaccaagcuggccggcuucaugaaguucuacaacagcguguggaccuuccacggcgagacccccaacgccaccaccgacuacagcagcaccagcaaccuguucgagguggagaccgugauccacguggaguucuacaucauccccagaagccaggagagcaagugcagcgaguacaucaacaccggccugugaggacuagucccuguucccagagcccacuuuuuuuucuuuuuuugaaauaaaauagccugucuuucagaucuaaaaaaaaaaaaaaaaaaaaaaaaaaaaaaaaaaaaaaaaaaaaaaaaaaaaaaaaaaaaaaaaaaaaaaaaaaaaaaaaaaaaaaaaaaaaaaaaaaaa

SEQ ID NO: 788 - RNA, 842 nt, Artificial Sequence
  mRNA product Design a-1 (A100) comprising derived and/or modified sequence from RVA/1076/P[6]__AAA47337.1__SP-IgE_P2_VP8*(65-223) (opt4)
aggagagucccgcagucggcguccagcggcucugcuuguucgugugugugucguugcaggccuuauucaagcuuaccauggacuggaccuggauccuguuccugguggccgccgccaccagagugcacagccaguacaucaaggccaacagcaaguucaucggcaucaccgagcugggcagcggcagcggccuggacggccccuaccagcccaccagcuucaagccccccagcgacuacuggauccugcugaaccccaccaaccagcagguggugcuggagggcaccaacaagaccgacaucuggguggcccugcugcugguggagcccaacgugaccaaccagagcagacaguacacccuguucggcgagaccaagcagaucaccguggagaacaacaccaacaaguggaaguucuucgagauguucagaagcagcgugagcgccgaguuccagcacaagagaacccugaccagcgacaccaagcuggccggcuuccugaaguucuacaacagcguguggaccuucuacggcgagaccccccacgccaccaccgacuacagcagcaccagcaaccugagcgagguggagaccgccauccacguggaguucuacaucauccccagaagccaggagagcaagugcaacgaguacaucaacaccggccugugaggacuagucccuguucccagagcccacuuuuuuuucuuuuuuugaaauaaaauagccugucuuucagaucuaaaaaaaaaaaaaaaaaaaaaaaaaaaaaaaaaaaaaaaaaaaaaaaaaaaaaaaaaaaaaaaaaaaaaaaaaaaaaaaaaaaaaaaaaaaaaaaaaaaa

SEQ ID NO: 789 - RNA, 842 nt, Artificial Sequence
  mRNA product Design a-1 (A100) comprising derived and/or modified sequence from RVA/BE1128/P[8]__AEX30671.1__SP-IgE_P2_VP8*(65-223) (opt4)
aggagagucccgcagucggcguccagcggcucugcuuguucgugugugugucguugcaggccuuauucaagcuuaccauggacuggaccuggauccuguuccugguggccgccgccaccagagugcacagccaguacaucaaggccaacagcaaguucaucggcaucaccgagcugggcagcggcagcggccuggacggccccuaccagcccaccaccuucaccccccccaccgacuacuggauccugaucaccagcaacaccaacggcgugguguacgagagcaccaacaacagcgacuucuggaccgccgugaucgccguggagccccacgugaaccccguggacagacaguacaacguguucggcgagaacaagcaguucaacgugagaaacgacagcgacaaguggaaguuccuggagauguucagaggcagcagccagaacgacuucuacaacagaagaacccugaccagcgacaccagacuggugggcauccugaaguacggcggcagaguguggaccuuccacggcgagacccccagagccaccaccgacagcagcaacaccgccaaccuggacggcaucagcaucaccauccacagcgaguucuacaucauccccagaagccaggagagcaagugcaacgaguacaucaacaacggccugugaggacuagucccuguucccagagcccacuuuuuuuucuuuuuuugaaauaaaauagccugucuuucagaucuaaaaaaaaaaaaaaaaaaaaaaaaaaaaaaaaaaaaaaaaaaaaaaaaaaaaaaaaaaaaaaaaaaaaaaaaaaaaaaaaaaaaaaaaaaaaaaaaaaaa

SEQ ID NO: 790 - RNA, 842 nt, Artificial Sequence
  mRNA product Design a-1 (A100) comprising derived and/or modified sequence from RVA/Wa-VirWa/P[8]__ACR22783.1__SP-IgE_P2_VP8*(65-223) (opt4)
aggagagucccgcagucggcguccagcggcucugcuuguucgugugugugucguugcaggccuuauucaagcuuaccauggacuggaccuggauccuguuccugguggccgccgccaccagagugcacagccaguacaucaaggccaacagcaaguucaucggcaucaccgagcugggcagcggcagcggccuggacggccccuaccagcccaccaccuucaccccccccaacgacuacuggauccugaucaacagcaacaccaacggcgugguguacgagagcaccaacaacagcgacuucuggaccgccgugguggccaucgagccccacgugaaccccguggacagacaguacaccaucuucggcgagagcaagcaguucaacgugagaaacgacagcaacaaguggaaguuccuggagauguucagaagcagcagccagaacgaguucuacaacagaagaacccugaccagcgacaccagacuggugggcauccugaaguacggcggcagaguguggaccuuccacggcgagacccccagagccaccaccgacagcagcagcaccgccaaccugaacaacaucagcaucaccauccacagcgaguucuacaucauccccagaagccaggagagcaagugcaacgaguacaucaacaacggccugugaggacuagucccuguucccagagcccacuuuuuuuucuuuuuuugaaauaaaauagccugucuuucagaucuaaaaaaaaaaaaaaaaaaaaaaaaaaaaaaaaaaaaaaaaaaaaaaaaaaaaaaaaaaaaaaaaaaaaaaaaaaaaaaaaaaaaaaaaaaaaaaaaaaaa

SEQ ID NO: 791 - RNA, 842 nt, Artificial Sequence
  mRNA product Design a-1 (A100) comprising derived and/or modified sequence from RVA/Wa/P[8]__AAA47290.1__SP-IgE_P2_VP8*(65-223) (opt4)
aggagagucccgcagucggcguccagcggcucugcuuguucgugugugugucguugcaggccuuauucaagcuuaccauggacuggaccuggauccuguuccugguggccgccgccaccagagugcacagccaguacaucaaggccaacagcaaguucaucggcaucaccgagcugggcagcggcagcggccuggacggccccuaccagcccaccaccuucaccccccccaacgacuacuggauccugaucaacagcaacaccaacggcgugguguacgagagcaccaacaacagcgacuucuggaccgccgugguggccaucgagccccacgugaaccccguggacagacaguacaccaucuucggcgagagcaagcaguucaacgugagcaacgacagcaacaaguggaaguuccuggagauguucagaagcagcagccagaacgaguucuacaacagaagaacccugaccagcgacaccagauucgugggcauccugaaguacggcggcagaguguggaccuuccacggcgagacccccagagccaccaccgacagcagcagcaccgccaaccugaacaacaucagcaucaccauccacagcgaguucuacaucauccccagaagccaggagagcaagugcaacgaguacaucaacaacggccugugaggacuagucccuguucccagagcccacuuuuuuuucuuuuuuugaaauaaaauagccugucuuucagaucuaaaaaaaaaaaaaaaaaaaaaaaaaaaaaaaaaaaaaaaaaaaaaaaaaaaaaaaaaaaaaaaaaaaaaaaaaaaaaaaaaaaaaaaaaaaaaaaaaaaa

SEQ ID NO: 792 - RNA, 842 nt, Artificial Sequence; identical to SEQ ID NO: 791
  mRNA product Design a-1 (A100) comprising derived and/or modified sequence from RVA/Wa/P[8]__AAA66953.1__SP-IgE_P2_VP8*(65-223) (opt4)

SEQ ID NO: 793 - RNA, 914 nt, Artificial Sequence
  mRNA product Design a-1 (A100) comprising derived and/or modified sequence from RVA/BE1058/P[4]__AEX30665.1__SP-IgE_P2_VP8*(41-223) (opt4)
aggagagucccgcagucggcguccagcggcucugcuuguucgugugugugucguugcaggccuuauucaagcuuaccauggacuggaccuggauccuguuccugguggccgccgccaccagagugcacagccaguacaucaaggccaacagcaaguucaucggcaucaccgagcugggcagcggcagcggcgcccagaccagauacgcccccgugaacuggggccacggcgagaucaacgacagcaccaccguggagcccgugcuggacggccccuaccagcccaccaccuucaagccccccaacgacuacuggcugcugaucagcagcaacaccgacggcgugguguacgagagcaccaacaacagcgacuucuggaccgccgugaucgccguggagccccacgugaaccagaccaacagacaguacgugcuguucggcgagaacaagcaguucaacaucgagaacagcagcgacaaguggaaguucuucgagauguucaagggcaacagccagagcgacuucagcaacagaagaacccugaccagcagcaacagacuggugggcaugcugaaguacggcggcagaguguggaccuuccacggcgagacccccagagccaccaccgacagcagcagcaccgccgaccugaacaacaucagcaucaucauccacagcgaguucuacaucauccccagaagccaggagagcaagugcaacgaguacaucaacaacggccugugaggacuagucccuguucccagagcccacuuuuuuuucuuuuuuugaaauaaaauagccugucuuucagaucuaaaaaaaaaaaaaaaaaaaaaaaaaaaaaaaaaaaaaaaaaaaaaaaaaaaaaaaaaaaaaaaaaaaaaaaaaaaaaaaaaaaaaaaaaaaaaaaaaaaa

SEQ ID NO: 794 - RNA, 914 nt, Artificial Sequence
  mRNA product Design a-1 (A100) comprising derived and/or modified sequence from RVA/DS-1/P[4]__CAD62680.1__SP-IgE_P2_VP8*(41-223) (opt4)
aggagagucccgcagucggcguccagcggcucugcuuguucgugugugugucguugcaggccuuauucaagcuuaccauggacuggaccuggauccuguuccugguggccgccgccaccagagugcacagccaguacaucaaggccaacagcaaguucaucggcaucaccgagcugggcagcggcagcggcgcccagaccagauacgcccccgugaacuggggcagcugggagaucaacgacagcaccaccguggagcccgugcuggacggccccuaccagcccaccaccuucaagccccccaacgacuacuggcugcugaucagcagcaacaccaacggcgugguguacgagagcaccaacaacaacgacuucuggaccgccgugagcagcguggagccccacgugagccagaccaacagacaguacauccuguucggcgagaacaagcaguucaacguggagaacaacagcgacaaguggaaguucuucgagaccuucaccggcagcagccagggcaacuucagcaacagaagaacccugaccagcagcaacagacuggugggcaugcugaaguacggcggcagaguguggaccuuccacggcgagacccccagagccaccaccgacagcagcaacaccgccgaccugaacaacaucagcaucaucauccacagcgaguucuacaucauccccagaagccaggagagcaagugcaacgaguacaucaacaacggccugugaggacuagucccuguucccagagcccacuuuuuuuucuuuuuuugaaauaaaauagccugucuuucagaucuaaaaaaaaaaaaaaaaaaaaaaaaaaaaaaaaaaaaaaaaaaaaaaaaaaaaaaaaaaaaaaaaaaaaaaaaaaaaaaaaaaaaaaaaaaaaaaaaaaaa

SEQ ID NO: 795 - RNA, 914 nt, Artificial Sequence; identical to SEQ ID NO: 794
  mRNA product Design a-1 (A100) comprising derived and/or modified sequence from RVA/DS-1/P[4]__ABV53252.1__SP-IgE_P2_VP8*(41-223) (opt4)

SEQ ID NO: 796 - RNA, 914 nt, Artificial Sequence
  mRNA product Design a-1 (A100) comprising derived and/or modified sequence from RVA/F01322/P[6]__AFA51886.1__SP-IgE_P2_VP8*(41-223) (opt4)
aggagagucccgcagucggcguccagcggcucugcuuguucgugugugugucguugcaggccuuauucaagcuuaccauggacuggaccuggauccuguuccugguggccgccgccaccagagugcacagccaguacaucaaggccaacagcaaguucaucggcaucaccgagcugggcagcggcagcggcgcccagaccaacuacgcccccgugaccuggagccacggcgaggugaacgacagcaccaccaucgagcccgugcuggacggccccuaccagcccaccaacuucaagccccccaacgacuacuggauccugcugaaccccaccaaccagcagguggugcuggagggcaccaacaagaccgacaucuggguggcccugcugcugguggagcccaacgugaccaaccagagcagacaguacacccuguucggcgagaccaagcagaucaccguggagaacaacaccaacaaguggaaguucuucgagauguucagaagcagcgugagcgccgaguuccagcacaagagaacccugaccagcgacaccaagcuggccggcuucaugaaguucuacaacagcguguggaccuuccacggcgagacccccaacgccaccaccgacuacagcagcaccagcaaccuguucgagguggagaccgugauccacguggaguucuacaucauccccagaagccaggagagcaagugcagcgaguacaucaacaccggccugugaggacuagucccuguucccagagcccacuuuuuuuucuuuuuuugaaauaaaauagccugucuuucagaucuaaaaaaaaaaaaaaaaaaaaaaaaaaaaaaaaaaaaaaaaaaaaaaaaaaaaaaaaaaaaaaaaaaaaaaaaaaaaaaaaaaaaaaaaaaaaaaaaaaaa

SEQ ID NO: 797 - RNA, 914 nt, Artificial Sequence
  mRNA product Design a-1 (A100) comprising derived and/or modified sequence from RVA/1076/P[6]__AAA47337.1__SP-IgE_P2_VP8*(41-223) (opt4)
aggagagucccgcagucggcguccagcggcucugcuuguucgugugugugucguugcaggccuuauucaagcuuaccauggacuggaccuggauccuguuccugguggccgccgccaccagagugcacagccaguacaucaaggccaacagcaaguucaucggcaucaccgagcugggcagcggcagcggcgcccagaccaacuacgcccccgugaccuggagccacggcgaggugaacgacagcaccaccaucgagcccgugcuggacggccccuaccagcccaccagcuucaagccccccagcgacuacuggauccugcugaaccccaccaaccagcagguggugcuggagggcaccaacaagaccgacaucuggguggcccugcugcugguggagcccaacgugaccaaccagagcagacaguacacccuguucggcgagaccaagcagaucaccguggagaacaacaccaacaaguggaaguucuucgagauguucagaagcagcgugagcgccgaguuccagcacaagagaacccugaccagcgacaccaagcuggccggcuuccugaaguucuacaacagcguguggaccuucuacggcgagaccccccacgccaccaccgacuacagcagcaccagcaaccugagcgagguggagaccgccauccacguggaguucuacaucauccccagaagccaggagagcaagugcaacgaguacaucaacaccggccugugaggacuagucccuguucccagagcccacuuuuuuuucuuuuuuugaaauaaaauagccugucuuucagaucuaaaaaaaaaaaaaaaaaaaaaaaaaaaaaaaaaaaaaaaaaaaaaaaaaaaaaaaaaaaaaaaaaaaaaaaaaaaaaaaaaaaaaaaaaaaaaaaaaaaa

SEQ ID NO: 798 - RNA, 914 nt, Artificial Sequence
  mRNA product Design a-1 (A100) comprising derived and/or modified sequence from RVA/BE1128/P[8]__AEX30671.1__SP-IgE_P2_VP8*(41-223) (opt4)
aggagagucccgcagucggcguccagcggcucugcuuguucgugugugugucguugcaggccuuauucaagcuuaccauggacuggaccuggauccuguuccugguggccgccgccaccagagugcacagccaguacaucaaggccaacagcaaguucaucggcaucaccgagcugggcagcggcagcggcgcccagaccagauacgcccccgugaacuggggccacggcgagaucaacgacagcaccaccguggagcccauccuggacggccccuaccagcccaccaccuucaccccccccaccgacuacuggauccugaucaccagcaacaccaacggcgugguguacgagagcaccaacaacagcgacuucuggaccgccgugaucgccguggagccccacgugaaccccguggacagacaguacaacguguucggcgagaacaagcaguucaacgugagaaacgacagcgacaaguggaaguuccuggagauguucagaggcagcagccagaacgacuucuacaacagaagaacccugaccagcgacaccagacuggugggcauccugaaguacggcggcagaguguggaccuuccacggcgagacccccagagccaccaccgacagcagcaacaccgccaaccuggacggcaucagcaucaccauccacagcgaguucuacaucauccccagaagccaggagagcaagugcaacgaguacaucaacaacggccugugaggacuagucccuguucccagagcccacuuuuuuuucuuuuuuugaaauaaaauagccugucuuucagaucuaaaaaaaaaaaaaaaaaaaaaaaaaaaaaaaaaaaaaaaaaaaaaaaaaaaaaaaaaaaaaaaaaaaaaaaaaaaaaaaaaaaaaaaaaaaaaaaaaaaa

SEQ ID NO: 799 - RNA, 914 nt, Artificial Sequence
  mRNA product Design a-1 (A100) comprising derived and/or modified sequence from RVA/Wa-VirWa/P[8]__ACR22783.1__SP-IgE_P2_VP8*(41-223) (opt4)
aggagagucccgcagucggcguccagcggcucugcuuguucgugugugugucguugcaggccuuauucaagcuuaccauggacuggaccuggauccuguuccugguggccgccgccaccagagugcacagccaguacaucaaggccaacagcaaguucaucggcaucaccgagcugggcagcggcagcggcgcccagaccagauacgcccccgugaacuggggccacggcgagaucaacgacagcaccaccguggagcccauccuggacggccccuaccagcccaccaccuucaccccccccaacgacuacuggauccugaucaacagcaacaccaacggcgugguguacgagagcaccaacaacagcgacuucuggaccgccgugguggccaucgagccccacgugaaccccguggacagacaguacaccaucuucggcgagagcaagcaguucaacgugagaaacgacagcaacaaguggaaguuccuggagauguucagaagcagcagccagaacgaguucuacaacagaagaacccugaccagcgacaccagacuggugggcauccugaaguacggcggcagaguguggaccuuccacggcgagacccccagagccaccaccgacagcagcagcaccgccaaccugaacaacaucagcaucaccauccacagcgaguucuacaucauccccagaagccaggagagcaagugcaacgaguacaucaacaacggccugugaggacuagucccuguucccagagcccacuuuuuuuucuuuuuuugaaauaaaauagccugucuuucagaucuaaaaaaaaaaaaaaaaaaaaaaaaaaaaaaaaaaaaaaaaaaaaaaaaaaaaaaaaaaaaaaaaaaaaaaaaaaaaaaaaaaaaaaaaaaaaaaaaaaaa

SEQ ID NO: 800 - RNA, 914 nt, Artificial Sequence
  mRNA product Design a-1 (A100) comprising derived and/or modified sequence from RVA/Wa/P[8]__AAA47290.1__SP-IgE_P2_VP8*(41-223) (opt4)
aggagagucccgcagucggcguccagcggcucugcuuguucgugugugugucguugcaggccuuauucaagcuuaccauggacuggaccuggauccuguuccugguggccgccgccaccagagugcacagccaguacaucaaggccaacagcaaguucaucggcaucaccgagcugggcagcggcagcggcgcccagaccagauacgcccccgugaacuggggccacggcgagaucaacgacagcaccaccguggagcccauccuggacggccccuaccagcccaccaccuucaccccccccaacgacuacuggauccugaucaacagcaacaccaacggcgugguguacgagagcaccaacaacagcgacuucuggaccgccgugguggccaucgagccccacgugaaccccguggacagacaguacaccaucuucggcgagagcaagcaguucaacgugagcaacgacagcaacaaguggaaguuccuggagauguucagaagcagcagccagaacgaguucuacaacagaagaacccugaccagcgacaccagauucgugggcauccugaaguacggcggcagaguguggaccuuccacggcgagacccccagagccaccaccgacagcagcagcaccgccaaccugaacaacaucagcaucaccauccacagcgaguucuacaucauccccagaagccaggagagcaagugcaacgaguacaucaacaacggccugugaggacuagucccuguucccagagcccacuuuuuuuucuuuuuuugaaauaaaauagccugucuuucagaucuaaaaaaaaaaaaaaaaaaaaaaaaaaaaaaaaaaaaaaaaaaaaaaaaaaaaaaaaaaaaaaaaaaaaaaaaaaaaaaaaaaaaaaaaaaaaaaaaaaaa

SEQ ID NO: 801 - RNA, 914 nt, Artificial Sequence
  mRNA product Design a-1 (A100) comprising derived and/or modified sequence from RVA/Wa/P[8]__AAA66953.1__SP-IgE_P2_VP8*(41-223) (opt4)
aggagagucccgcagucggcguccagcggcucugcuuguucgugugugugucguugcaggccuuauucaagcuuaccauggacuggaccuggauccuguuccugguggccgccgccaccagagugcacagccaguacaucaaggccaacagcaaguucaucggcaucaccgagcugggcagcggcagcggcgcccagaccagauacgcccccgugaacuggggccacggcgagaucaacgacagcaccaccguggagcccaugcuggacggccccuaccagcccaccaccuucaccccccccaacgacuacuggauccugaucaacagcaacaccaacggcgugguguacgagagcaccaacaacagcgacuucuggaccgccgugguggccaucgagccccacgugaaccccguggacagacaguacaccaucuucggcgagagcaagcaguucaacgugagcaacgacagcaacaaguggaaguuccuggagauguucagaagcagcagccagaacgaguucuacaacagaagaacccugaccagcgacaccagauucgugggcauccugaaguacggcggcagaguguggaccuuccacggcgagacccccagagccaccaccgacagcagcagcaccgccaaccugaacaacaucagcaucaccauccacagcgaguucuacaucauccccagaagccaggagagcaagugcaacgaguacaucaacaacggccugugaggacuagucccuguucccagagcccacuuuuuuuucuuuuuuugaaauaaaauagccugucuuucagaucuaaaaaaaaaaaaaaaaaaaaaaaaaaaaaaaaaaaaaaaaaaaaaaaaaaaaaaaaaaaaaaaaaaaaaaaaaaaaaaaaaaaaaaaaaaaaaaaaaaaa

SEQ ID NO: 802 - RNA, 791 nt, Artificial Sequence
  mRNA product Design a-1 (A100) comprising derived and/or modified sequence from RVA/BE1058/P[4]__AEX30665.1__P2_VP8*(65-223) (opt5)
aggagagucccgcagucggcguccagcggcucugcuuguucgugugugugucguugcaggccuuauucaagcuuaccaugcaguacaucaaggccaacagcaaauucauuggcaucaccgagcugggguccggaucuggccucgacgggcccuaucaaccuacaacguuuaagccgcccaaugauuacuggcugcuuauuagcuccaacaccgacggaguggucuaugaaucuacaaauaacagcgauuucuggaccgcuguuaucgccguggagccucacgugaaucagacaaacagacaguacguccuguuuggcgaaaauaaacaguucaacauugagaauagcucugacaaguggaaauuuuucgaaauguuuaaggggaacagccaauccgauuucagcaaucggcgcacccucacaucuuccaacagacuggugggaaugcuuaaguauggcggccggguuuggaccuuucauggggagacgccccgcgcgaccacagacuccucuuccaccgcugaucugaauaacaucagcaucauuauccacucugaguucuacauuaucccuagaucccaggaaagcaaaugcaaugaguauauuaacaacggacucugaggacuagucccuguucccagagcccacuuuuuuuucuuuuuuugaaauaaaauagccugucuuucagaucuaaaaaaaaaaaaaaaaaaaaaaaaaaaaaaaaaaaaaaaaaaaaaaaaaaaaaaaaaaaaaaaaaaaaaaaaaaaaaaaaaaaaaaaaaaaaaaaaaaaa

SEQ ID NO: 803 - RNA, 791 nt, Artificial Sequence
  mRNA product Design a-1 (A100) comprising derived and/or modified sequence from RVA/DS-1/P[4]__CAD62680.1__P2_VP8*(65-223) (opt5)
aggagagucccgcagucggcguccagcggcucugcuuguucgugugugugucguugcaggccuuauucaagcuuaccaugcaguacaucaaggccaacagcaaauucauuggcaucaccgagcugggguccggaucuggccucgacgggcccuaucaaccuacaacguuuaagccgcccaaugauuacuggcugcuuauuagcuccaacaccaauggaguggucuaugaaucuacaaacaauaacgacuucuggaccgcuguuagcuccguggagccucacgugucucagacaaauagacaguacauccuguuuggcgaaaacaaacaguucaaugucgagaacaauagcgauaaguggaaauuuuucgaaaccuuuacaggguccagccaaggaaacuucucuaaucggcgcacccucacguccagcaacagacuggugggcaugcuuaaguauggcgggcggguuuggaccuuucauggagagacaccccgcgccaccacagacucuuccaauaccgcggaucugaacaacauuagcaucaucauucacucugaguucuacaucauuccuagaucccaggaaagcaagugcaaugaguauaucaacaauggccucugaggacuagucccuguucccagagcccacuuuuuuuucuuuuuuugaaauaaaauagccugucuuucagaucuaaaaaaaaaaaaaaaaaaaaaaaaaaaaaaaaaaaaaaaaaaaaaaaaaaaaaaaaaaaaaaaaaaaaaaaaaaaaaaaaaaaaaaaaaaaaaaaaaaaa

SEQ ID NO: 804 - RNA, 791 nt, Artificial Sequence; identical to SEQ ID NO: 803
  mRNA product Design a-1 (A100) comprising derived and/or modified sequence from RVA/DS-1/P[4]__ABV53252.1__P2_VP8*(65-223) (opt5)

SEQ ID NO: 805 - RNA, 791 nt, Artificial Sequence
  mRNA product Design a-1 (A100) comprising derived and/or modified sequence from RVA/F01322/P[6]__AFA51886.1__P2_VP8*(65-223) (opt5)
aggagagucccgcagucggcguccagcggcucugcuuguucgugugugugucguugcaggccuuauucaagcuuaccaugcaguacaucaaggccaacagcaaauucauuggcaucaccgagcugggguccggaucuggccucgacgggcccuaucaaccuacaaauuuuaagccgcccaacgauuacuggauucugcuuaauccuacgaaccaacaggugguccuggaaggaaccaauaaaacagacaucuggguugcucuccugcuuguggagcccaacgugaccaaucagagcagacaguauacacuguucggcgaaaccaagcagauuacagucgagaacaauaccaacaaauggaaguuuuucgaaauguuucgguccucugugagcgccgaguuccagcacaagcgcacgcucaccuccgauacaaaacuggcgggguuuaugaaguucuacaauucuguuuggaccuuucauggagagacaccuaacgcuaccacggacuauagcuccacaagcaaucuguucgaaguggagaccgucauccacguggaauuuuacaucauucccagaucucaggaguccaaaugcagcgaguauaucaacacaggccucugaggacuagucccuguucccagagcccacuuuuuuuucuuuuuuugaaauaaaauagccugucuuucagaucuaaaaaaaaaaaaaaaaaaaaaaaaaaaaaaaaaaaaaaaaaaaaaaaaaaaaaaaaaaaaaaaaaaaaaaaaaaaaaaaaaaaaaaaaaaaaaaaaaaaa

SEQ ID NO: 806 - RNA, 791 nt, Artificial Sequence
  mRNA product Design a-1 (A100) comprising derived and/or modified sequence from RVA/1076/P[6]__AAA47337.1__P2_VP8*(65-223) (opt5)
aggagagucccgcagucggcguccagcggcucugcuuguucgugugugugucguugcaggccuuauucaagcuuaccaugcaguacaucaaggccaacagcaaauucauuggcaucaccgagcugggguccggaucuggccucgacgggcccuaucaaccuacgagcuuuaagccgcccuccgauuacuggauucugcuuaauccuacaaaccaacaggugguccuggaaggaaccaauaaaacagacaucuggguugcucuccugcuuguggagcccaacgugaccaaucagucuagacaguauacacuguucggcgaaaccaagcagauuacagucgagaacaauaccaacaaauggaaguuuuucgaaauguuucggagcuccgugucugccgaguuccagcacaagcgcacgcucaccagcgauacaaaacuggcgggguuucugaaguucuacaauuccguuuggaccuuuuauggagagacaccucaugcuaccacggacuacagcucuacauccaaccucagcgaaguggagaccgccauccacgucgaguucuauaucauucccagaucucaggaauccaaaugcaaugaguacaucaacacaggccugugaggacuagucccuguucccagagcccacuuuuuuuucuuuuuuugaaauaaaauagccugucuuucagaucuaaaaaaaaaaaaaaaaaaaaaaaaaaaaaaaaaaaaaaaaaaaaaaaaaaaaaaaaaaaaaaaaaaaaaaaaaaaaaaaaaaaaaaaaaaaaaaaaaaaa

SEQ ID NO: 807 - RNA, 791 nt, Artificial Sequence
  mRNA product Design a-1 (A100) comprising derived and/or modified sequence from RVA/BE1128/P[8]__AEX30671.1__P2_VP8*(65-223) (opt5)
aggagagucccgcagucggcguccagcggcucugcuuguucgugugugugucguugcaggccuuauucaagcuuaccaugcaguacaucaaggccaacagcaaauucauuggcaucaccgagcugggguccggaucuggccucgacgggcccuaucaaccuacaacguuuaccccgcccacagauuacuggauucugaucaccagcaauacaaacggaguggucuaugaauccaccaauaacucugacuucuggacagcuguuauugccguggagccucacgugaaucccgucgauagacaguacaacguguuuggcgaaaauaagcaguucaacguucggaaugacagcgauaaauggaaguuucuugagauguuccgcggguccucucagaacgacuuuuauaauagacggacccugacgagcgauacccgccucgugggaauccugaaauacggcggcagagucuggacauuccauggggaaaccccucgggcgacaaccgacuccagcaacacggcuaaucuugauggaaucucuauuacaauccacuccgaguuuuauauuaucccccgcagccaagagucuaagugcaacgaauacauuaauaacggccugugaggacuagucccuguucccagagcccacuuuuuuuucuuuuuuugaaauaaaauagccugucuuucagaucuaaaaaaaaaaaaaaaaaaaaaaaaaaaaaaaaaaaaaaaaaaaaaaaaaaaaaaaaaaaaaaaaaaaaaaaaaaaaaaaaaaaaaaaaaaaaaaaaaaaa

SEQ ID NO: 808 - RNA, 791 nt, Artificial Sequence
  mRNA product Design a-1 (A100) comprising derived and/or modified sequence from RVA/Wa-VirWa/P[8]__ACR22783.1__P2_VP8*(65-223) (opt5)
aggagagucccgcagucggcguccagcggcucugcuuguucgugugugugucguugcaggccuuauucaagcuuaccaugcaguacaucaaggccaacagcaaauucauuggcaucaccgagcugggguccggaucuggccucgacgggcccuaucaaccuacaacguuuaccccgcccaaugauuacuggauucugaucaacagcaauacaaacggaguggucuaugaauccaccaauaacucugacuucuggacagcuguuguggccauugagccucacgugaaucccgucgauagacaguacaccaucuuuggcgaaagcaagcaguucaacgugcggaaugacuccaacaaauggaaguuucuugagauguuccgcucuagcucccagaaugaauuuuauaacagacggacacugaccagcgauacgcgccucguugggauccugaaauacggaggcagaguguggaccuuccauggcgagacaccucgggcgaccacagacucuuccagcaccgcuaaucuuaacaauauuucuaucacgauucacuccgaguuuuauaucauuccccgcagccaagaaucuaagugcaacgaguacaucaacaaugggcugugaggacuagucccuguucccagagcccacuuuuuuuucuuuuuuugaaauaaaauagccugucuuucagaucuaaaaaaaaaaaaaaaaaaaaaaaaaaaaaaaaaaaaaaaaaaaaaaaaaaaaaaaaaaaaaaaaaaaaaaaaaaaaaaaaaaaaaaaaaaaaaaaaaaaa

SEQ ID NO: 809 - RNA, 791 nt, Artificial Sequence
  mRNA product Design a-1 (A100) comprising derived and/or modified sequence from RVA/Wa/P[8]__AAA47290.1__P2_VP8*(65-223) (opt5)
aggagagucccgcagucggcguccagcggcucugcuuguucgugugugugucguugcaggccuuauucaagcuuaccaugcaguacaucaaggccaacagcaaauucauuggcaucaccgagcugggguccggaucuggccucgacgggcccuaucaaccuacaacguuuaccccgcccaaugauuacuggauucugaucaacagcaauacaaacggaguggucuaugaauccaccaauaacucugacuucuggacagcuguuguggccauugagccucacgugaaucccgucgauagacaguacaccaucuuuggcgaaagcaagcaguucaacguguccaaugacucuaacaaauggaaguuucuugagauguuccggagcuccagccagaaugaauuuuauaaccgcagaacacugaccucugauacgcgguucguugggauccucaaauacggaggccgcguguggaccuuucauggcgagacaccuagagcgaccacagacuccagcucuaccgcuaaucugaacaauauuuccaucacgauucacagcgaguucuauaucauuccccggucucaagaauccaagugcaacgaguacaucaacaaugggcuuugaggacuagucccuguucccagagcccacuuuuuuuucuuuuuuugaaauaaaauagccugucuuucagaucuaaaaaaaaaaaaaaaaaaaaaaaaaaaaaaaaaaaaaaaaaaaaaaaaaaaaaaaaaaaaaaaaaaaaaaaaaaaaaaaaaaaaaaaaaaaaaaaaaaaa

SEQ ID NO: 810 - RNA, 791 nt, Artificial Sequence; identical to SEQ ID NO: 809
  mRNA product Design a-1 (A100) comprising derived and/or modified sequence from RVA/Wa/P[8]__AAA66953.1__P2_VP8*(65-223) (opt5)

SEQ ID NO: 811 - RNA, 863 nt, Artificial Sequence
  mRNA product Design a-1 (A100) comprising derived and/or modified sequence from RVA/BE1058/P[4]__AEX30665.1__P2_VP8*(41-223) (opt5)
aggagagucccgcagucggcguccagcggcucugcuuguucgugugugugucguugcaggccuuauucaagcuuaccaugcaguacaucaaggccaacagcaaauucauuggcaucaccgagcugggguccggaucuggcgcucaaacaagauaugcccccgugaauugggggcacggagaaauuaacgacagcacgaccgucgagccuguucucgauggcccguaccagcccacaaccuuuaagccucccaaugacuauuggcugcuuaucuccucuaacacagauggggugguguacgaaagcaccaauaacuccgacuucuggacagcggucauugcuguggagccucauguuaaucagaccaaccggcaguaugugcuguuuggagaaaauaaacaauucaacaucgaaaauucuagcgauaaguggaaauuuuucgagauguuuaagggcaacucccagagcgacuucucuaaucgcagaacgcucaccuccagcaaccggcuggucggcaugcuuaaguacgggggacgcguguggacauuucacggcgagacccccagagccacaaccgauucuuccagcacggccgaccugaauaacaucucuauuaucauucauuccgaguucuauaucauuccucggagccaggaauccaaaugcaacgaguacaucaauaacgggcucugaggacuagucccuguucccagagcccacuuuuuuuucuuuuuuugaaauaaaauagccugucuuucagaucuaaaaaaaaaaaaaaaaaaaaaaaaaaaaaaaaaaaaaaaaaaaaaaaaaaaaaaaaaaaaaaaaaaaaaaaaaaaaaaaaaaaaaaaaaaaaaaaaaaaa

SEQ ID NO: 812 - RNA, 863 nt, Artificial Sequence
  mRNA product Design a-1 (A100) comprising derived and/or modified sequence from RVA/DS-1/P[4]__CAD62680.1__P2_VP8*(41-223) (opt5)
aggagagucccgcagucggcguccagcggcucugcuuguucgugugugugucguugcaggccuuauucaagcuuaccaugcaguacaucaaggccaacagcaaauucauuggcaucaccgagcugggguccggaucuggcgcucaaacaagauaugcccccgugaauugggggagcugggaaauuaacgacuccacgaccgucgagccuguucucgauggaccguaccagcccacaaccuuuaagccucccaaugacuauuggcugcuuaucucuagcaacacaaauggcgugguguacgaauccaccaacaauaacgauuucuggacagcggucucuagcguggagccucacguuucccagaccaaucggcaguauauucuguuuggggaaaacaaacaauucaauguggagaacaauagcgacaaguggaaauuuuucgagacguuuaccggaucuucccagggcaacuucagcaaucgcagaacacucaccucuuccaaccggcuggucggcaugcuuaaguacgggggacgcguguggacauuucauggcgaaacccccagagcuacgacagauagcucuaacaccgccgaccugaauaacaucuccaucauuauccacagcgaguucuauauuaucccucggucccaggaaucuaagugcaaugaguacauuaacaaugggcucugaggacuagucccuguucccagagcccacuuuuuuuucuuuuuuugaaauaaaauagccugucuuucagaucuaaaaaaaaaaaaaaaaaaaaaaaaaaaaaaaaaaaaaaaaaaaaaaaaaaaaaaaaaaaaaaaaaaaaaaaaaaaaaaaaaaaaaaaaaaaaaaaaaaaa

SEQ ID NO: 813 - RNA, 863 nt, Artificial Sequence; identical to SEQ ID NO: 812
  mRNA product Design a-1 (A100) comprising derived and/or modified sequence from RVA/DS-1/P[4]__ABV53252.1__P2_VP8*(41-223) (opt5)

SEQ ID NO: 814 - RNA, 863 nt, Artificial Sequence
  mRNA product Design a-1 (A100) comprising derived and/or modified sequence from RVA/F01322/P[6]__AFA51886.1__P2_VP8*(41-223) (opt5)
aggagagucccgcagucggcguccagcggcucugcuuguucgugugugugucguugcaggccuuauucaagcuuaccaugcaguacaucaaggccaacagcaaauucauuggcaucaccgagcugggguccggaucuggcgcucaaacaaauuaugcccccgugacguggagccacggggaagucaacgacuccaccacaauugagccuguucucgauggaccguaccagcccaccaauuuuaagccucccaacgacuauuggauccugcuuaauccuacaaaccaacagguggugcuggaaggcaccaauaaaacagauauuugggucgcgcuccugcuuguggagcccaacguuaccaaucagucuagacaguacacgcuguucggggaaaccaagcagaucacaguggagaacaauaccaacaaauggaaguuuuucgagauguuucggagcuccgucucugcugaguuccagcauaagcgcacacucaccagcgacacgaaacuggccggauuuaugaaguucuauaauuccguguggacauuucacggcgaaaccccuaacgccacaaccgauuacagcucuaccuccaaucuguucgaaguugagacagugauccaugucgaguuuuauauuaucccgagaagccaagaaucuaaaugcuccgaguacauuaacacgggccucugaggacuagucccuguucccagagcccacuuuuuuuucuuuuuuugaaauaaaauagccugucuuucagaucuaaaaaaaaaaaaaaaaaaaaaaaaaaaaaaaaaaaaaaaaaaaaaaaaaaaaaaaaaaaaaaaaaaaaaaaaaaaaaaaaaaaaaaaaaaaaaaaaaaaa

SEQ ID NO: 815 - RNA, 863 nt, Artificial Sequence
  mRNA product Design a-1 (A100) comprising derived and/or modified sequence from RVA/1076/P[6]__AAA47337.1__P2_VP8*(41-223) (opt5)
aggagagucccgcagucggcguccagcggcucugcuuguucgugugugugucguugcaggccuuauucaagcuuaccaugcaguacaucaaggccaacagcaaauucauuggcaucaccgagcugggguccggaucuggcgcucaaacaaauuaugcccccgugacguggagccacggggaagucaacgacuccaccacaauugagccuguucucgauggaccguaccagcccaccucuuuuaagccucccagcgacuauuggauccugcuuaauccuacaaaccaacagguggugcuggaaggcaccaauaaaacagauauuugggucgcgcuccugcuuguggagcccaacguuaccaaucaguccagacaguacacgcuguucggggaaaccaagcagaucacaguggagaacaauaccaacaaauggaaguuuuucgagauguuucggucuagcgucuccgcugaguuccagcauaagcgcacacucaccagcgacacgaaacuggccggauuucugaaguucuauaauucuguguggacauuuuacggcgaaaccccucacgccacaaccgauuauuccagcaccucuaaccucuccgaaguugagacagcuauccauguggaguucuacauuaucccgagaagccaagaaucuaaaugcaaugaguacauuaacacgggccugugaggacuagucccuguucccagagcccacuuuuuuuucuuuuuuugaaauaaaauagccugucuuucagaucuaaaaaaaaaaaaaaaaaaaaaaaaaaaaaaaaaaaaaaaaaaaaaaaaaaaaaaaaaaaaaaaaaaaaaaaaaaaaaaaaaaaaaaaaaaaaaaaaaaaa

SEQ ID NO: 816 - RNA, 863 nt, Artificial Sequence
  mRNA product Design a-1 (A100) comprising derived and/or modified sequence from RVA/BE1128/P[8]__AEX30671.1__P2_VP8*(41-223) (opt5)
aggagagucccgcagucggcguccagcggcucugcuuguucgugugugugucguugcaggccuuauucaagcuuaccaugcaguacaucaaggccaacagcaaauucauuggcaucaccgagcugggguccggaucuggcgcucaaacaagauaugcccccgugaauugggggcacggagaaauuaacgacagcacgaccgucgagccuauccucgauggcccguaccagcccacaaccuuuacaccucccaccgacuauuggauucugaucacauccaauaccaacgggguuguguacgaaucuacgaauaacagcgauuucuggaccgcggugaucgcugucgagccucaugugaaucccguugaccggcaguauaacguguuuggagaaaauaagcaguucaacguccgcaaugauuccgacaaauggaaguuucuugagauguucagaggcucuagccaaaacgauuuuuacaaucggcgcacacugaccuccgacacaagacucgugggcauucugaaauaugggggacggguuuggaccuuccacggcgagacgccucgcgccacaaccgauagcucuaacacagccaaucuugacgggaucuccauuaccauccauagcgaauuuuacauuaucccgagaucucaggaguccaagugcaacgaauacauuaacaauggacugugaggacuagucccuguucccagagcccacuuuuuuuucuuuuuuugaaauaaaauagccugucuuucagaucuaaaaaaaaaaaaaaaaaaaaaaaaaaaaaaaaaaaaaaaaaaaaaaaaaaaaaaaaaaaaaaaaaaaaaaaaaaaaaaaaaaaaaaaaaaaaaaaaaaaa

SEQ ID NO: 817 - RNA, 863 nt, Artificial Sequence
  mRNA product Design a-1 (A100) comprising derived and/or modified sequence from RVA/Wa-VirWa/P[8]__ACR22783.1__P2_VP8*(41-223) (opt5)
aggagagucccgcagucggcguccagcggcucugcuuguucgugugugugucguugcaggccuuauucaagcuuaccaugcaguacaucaaggccaacagcaaauucauuggcaucaccgagcugggguccggaucuggcgcucaaacaagauaugcccccgugaauugggggcacggagaaauuaacgacagcacgaccgucgagccuauccucgauggcccguaccagcccacaaccuuuacaccucccaaugacuauuggauucugaucaacuccaauaccaacgggguuguguacgaaucuacaaauaacagcgauuucuggaccgcgguggucgcuaucgagccucaugugaaucccguugaccggcaguauacgauuuuuggagaauccaagcaguucaacgugcgcaaugauucuaacaaauggaaguuucuugagauguucagaagcuccagccaaaaugaguuuuacaaccggcgcacccugacaucugacaccagacucgucggcauccugaaauauggcgggcggguguggacauuccacggagaaaccccucgcgccacgacagauuccagcucuaccgccaaucuuaacaacauuuccaucacaauucauagcgaguuuuacaucauuccgagaucucaggaauccaagugcaaugaguacaucaacaauggccugugaggacuagucccuguucccagagcccacuuuuuuuucuuuuuuugaaauaaaauagccugucuuucagaucuaaaaaaaaaaaaaaaaaaaaaaaaaaaaaaaaaaaaaaaaaaaaaaaaaaaaaaaaaaaaaaaaaaaaaaaaaaaaaaaaaaaaaaaaaaaaaaaaaaaa

SEQ ID NO: 818 - RNA, 863 nt, Artificial Sequence
  mRNA product Design a-1 (A100) comprising derived and/or modified sequence from RVA/Wa/P[8]__AAA47290.1__P2_VP8*(41-223) (opt5)
aggagagucccgcagucggcguccagcggcucugcuuguucgugugugugucguugcaggccuuauucaagcuuaccaugcaguacaucaaggccaacagcaaauucauuggcaucaccgagcugggguccggaucuggcgcucaaacaagauaugcccccgugaauugggggcacggagaaauuaacgacagcacgaccgucgagccuauccucgauggcccguaccagcccacaaccuuuacaccucccaaugacuauuggauucugaucaacuccaauaccaacgggguuguguacgaaucuacaaauaacagcgauuucuggaccgcgguggucgcuaucgagccucaugugaaucccguugaccggcaguauacgauuuuuggagaauccaagcaguucaacgugucuaaugauagcaacaaauggaaguuucuugagauguuccgcuccagcucucaaaaugaguuuuacaacagacggacccugacauccgacacccgcuucgucggcauccucaaauauggcgggagaguguggacauuucacggagaaaccccucgggccacgacagauucuagcuccaccgccaaucugaacaacauuagcaucacaauucauucugaguucuacaucauuccgcgcucccaggaaagcaagugcaaugaguacaucaacaauggccuuugaggacuagucccuguucccagagcccacuuuuuuuucuuuuuuugaaauaaaauagccugucuuucagaucuaaaaaaaaaaaaaaaaaaaaaaaaaaaaaaaaaaaaaaaaaaaaaaaaaaaaaaaaaaaaaaaaaaaaaaaaaaaaaaaaaaaaaaaaaaaaaaaaaaaa

SEQ ID NO: 819 - RNA, 863 nt, Artificial Sequence
  mRNA product Design a-1 (A100) comprising derived and/or modified sequence from RVA/Wa/P[8]__AAA66953.1__P2_VP8*(41-223) (opt5)
aggagagucccgcagucggcguccagcggcucugcuuguucgugugugugucguugcaggccuuauucaagcuuaccaugcaguacaucaaggccaacagcaaauucauuggcaucaccgagcugggguccggaucuggcgcucaaacaagauaugcccccgugaauugggggcacggagaaauuaacgacagcacgaccgucgagccuaugcucgauggcccguaccagcccacaaccuuuacaccucccaaugacuauuggauccugauuaacuccaauaccaacgggguuguguacgaaucuacaaauaacagcgauuucuggaccgcgguggucgcuaucgagccucaugugaaucccguugaccggcaguauacgaucuuuggagaauccaagcaguucaacgugucuaaugauagcaacaaauggaaguuucuugagauguuccgcuccagcucucaaaaugaguuuuacaacagacggacccugacauccgacacccgcuucgucggcauucucaaauauggcgggagaguguggacauuucacggagaaaccccucgggccacgacagauucuagcuccaccgccaaucugaacaacaucagcauuacaauccauucugaguucuacauuaucccgcgcucccaggaaagcaagugcaaugaguacauuaacaauggccuuugaggacuagucccuguucccagagcccacuuuuuuuucuuuuuuugaaauaaaauagccugucuuucagaucuaaaaaaaaaaaaaaaaaaaaaaaaaaaaaaaaaaaaaaaaaaaaaaaaaaaaaaaaaaaaaaaaaaaaaaaaaaaaaaaaaaaaaaaaaaaaaaaaaaaa

SEQ ID NO: 820 - RNA, 1289 nt, Artificial Sequence
  mRNA product Design a-1 (A100) comprising derived and/or modified sequence from RVA/BE1058/P[4]__AEX30665.1__P2_VP8*(65-223)_Ferritin (opt5)
aggagagucccgcagucggcguccagcggcucugcuuguucgugugugugucguugcaggccuuauucaagcuuaccaugcaguacaucaaggccaacagcaaauucauuggcaucaccgagcugggguccggaucuggccucgacgggcccuaucaaccuacaacguuuaagccgcccaaugauuacuggcugcuuauuagcuccaacaccgacggaguggucuaugaaucuacaaauaacagcgauuucuggaccgcuguuaucgccguggagccucacgugaaucagacaaacagacaguacguccuguuuggcgaaaauaaacaguucaacauugagaauagcucugacaaguggaaauuuuucgaaauguuuaaggggaacagccaauccgauuucagcaaucggcgcacccucacaucuuccaacagacuggugggaaugcuuaaguauggcggccggguuuggaccuuucauggggagacgccccgcgcgaccacagacuccucuuccaccgcugaucugaauaacaucagcaucauuauccacucugaguucuacauuaucccuagaucccaggaaagcaaaugcaaugaguauauuaacaacggacucuccggcggggacaucauuaagcugcugaaugaacaggugaacaaagagaugcagucuagcaaucucuacauguccaugagcucuugguguuacacacauucccuggauggagccggccuuuuucuguucgaccacgccgcugaggaauaugagcaugccaagaaacucaucaucuuucugaacgaaaauaacguccccgugcaacuuaccagcauuucugcuccugagcacaaguucgaagggcugacgcagaucuuccagaaggccuacgagcacgagcagcauauuagcgaauccaucaauaacauuguugaucacgcgaucaaaucuaaggaccaugccacauuuaauuuccuccaaugguauguggcugagcagcacgaagaggaaguccuguuuaaagauauccuggacaagauugagcucaucggaaacgagaaucacggccuguaccuugccgaccaguaugugaaaggcauugcuaagagccggaaauccugaggacuagucccuguucccagagcccacuuuuuuuucuuuuuuugaaauaaaauagccugucuuucagaucuaaaaaaaaaaaaaaaaaaaaaaaaaaaaaaaaaaaaaaaaaaaaaaaaaaaaaaaaaaaaaaaaaaaaaaaaaaaaaaaaaaaaaaaaaaaaaaaaaaaa

SEQ ID NO: 821 - RNA, 1289 nt, Artificial Sequence
  mRNA product Design a-1 (A100) comprising derived and/or modified sequence from RVA/DS-1/P[4]__CAD62680.1__P2_VP8*(65-223)_Ferritin (opt5)
aggagagucccgcagucggcguccagcggcucugcuuguucgugugugugucguugcaggccuuauucaagcuuaccaugcaguacaucaaggccaacagcaaauucauuggcaucaccgagcugggguccggaucuggccucgacgggcccuaucaaccuacaacguuuaagccgcccaaugauuacuggcugcuuauuagcuccaacaccaauggaguggucuaugaaucuacaaacaauaacgacuucuggaccgcuguuagcuccguggagccucacgugucucagacaaauagacaguacauccuguuuggcgaaaacaaacaguucaaugucgagaacaauagcgauaaguggaaauuuuucgaaaccuuuacaggguccagccaaggaaacuucucuaaucggcgcacccucacguccagcaacagacuggugggcaugcuuaaguauggcgggcggguuuggaccuuucauggagagacaccccgcgccaccacagacucuuccaauaccgcggaucugaacaacauuagcaucaucauucacucugaguucuacaucauuccuagaucccaggaaagcaagugcaaugaguauaucaacaauggccucuccgggggagacauuaucaaacugcugaacgaacaggugaauaaggagaugcagucuagcaaccucuacauguccaugagcucuugguguuacacgcauucccuggauggcgcugggcuuuuucuguucgaccacgccgccgaggaauaugagcaugcuaaaaagcucauuaucuuucugaaugaaaacaauguccccgugcaacuuacaagcaucucugccccugagcacaaauucgaaggacugacccagauuuuccagaaggcuuacgagcacgagcagcauaucagcgaauccauuaacaauaucguugaucacgccauuaagucuaaagaccaugcgacauuuaacuuccuccaaugguauguggccgagcagcacgaagaggaaguccuguuuaaggauauccuggacaaaaucgagcucauuggcaaugagaaccacggccuguaccuugcugaucaguaugugaaggggaucgccaaaagccggaaguccugaggacuagucccuguucccagagcccacuuuuuuuucuuuuuuugaaauaaaauagccugucuuucagaucuaaaaaaaaaaaaaaaaaaaaaaaaaaaaaaaaaaaaaaaaaaaaaaaaaaaaaaaaaaaaaaaaaaaaaaaaaaaaaaaaaaaaaaaaaaaaaaaaaaaa

SEQ ID NO: 822 - RNA, 1289 nt, Artificial Sequence; identical to SEQ ID NO: 821
  mRNA product Design a-1 (A100) comprising derived and/or modified sequence from RVA/DS-1/P[4]__ABV53252.1__P2_VP8*(65-223)_Ferritin (opt5)

SEQ ID NO: 823 - RNA, 1289 nt, Artificial Sequence
  mRNA product Design a-1 (A100) comprising derived and/or modified sequence from RVA/F01322/P[6]__AFA51886.1__P2_VP8*(65-223)_Ferritin (opt5)
aggagagucccgcagucggcguccagcggcucugcuuguucgugugugugucguugcaggccuuauucaagcuuaccaugcaguacaucaaggccaacagcaaauucauuggcaucaccgagcugggguccggaucuggccucgacgggcccuaucaaccuacaaauuuuaagccgcccaacgauuacuggauucugcuuaauccuacgaaccaacaggugguccuggaaggaaccaauaaaacagacaucuggguugcucuccugcuuguggagcccaacgugaccaaucagagccggcaguauacacuguucggcgaaaccaagcagauuacagucgagaacaauaccaacaaauggaaguuuuucgaaauguuucgguccucugugagcgccgaguuccagcacaagcgcacgcucaccuccgauacaaaacuggcgggguuuaugaaguucuacaauucuguuuggaccuuucauggagagacaccuaacgcuaccacggacuauagcuccacaagcaaucuguucgaaguggagaccgucauccacguggaauuuuacaucauucccagaucucaggaguccaaaugcagcgaguauaucaacacaggccucucuggcggggauauuaucaagcugcuuaaugaacaaguuaacaaagagaugcaguccagcaaccuguacaugucuauguccagcugguguuacacccauucccucgacggagccggccuguuccuuuuugaucacgccgcugaagaguaugaacaugccaagaagcugauuaucuuccucaaugagaacaaugugccuguccagcugaccucuauuagcgcuccggagcacaaauucgaagggcugacacagaucuuucaaaaggccuacgagcacgaacagcauaucuccgagagcauuaacaauaucguggaccacgcgauuaaaucuaaggaucaugccacguucaacuuucuccagugguauguggcugaacaacacgaggaggaaguccuguucaaagacauccuugauaagauugagcugaucggaaaugaaaaccacggccucuaccuggccgaccaguauguuaaagggaucgcuaaguccagaaagagcugaggacuagucccuguucccagagcccacuuuuuuuucuuuuuuugaaauaaaauagccugucuuucagaucuaaaaaaaaaaaaaaaaaaaaaaaaaaaaaaaaaaaaaaaaaaaaaaaaaaaaaaaaaaaaaaaaaaaaaaaaaaaaaaaaaaaaaaaaaaaaaaaaaaaa

SEQ ID NO: 824 - RNA, 1289 nt, Artificial Sequence
  mRNA product Design a-1 (A100) comprising derived and/or modified sequence from RVA/1076/P[6]__AAA47337.1__P2_VP8*(65-223)_Ferritin (opt5)
aggagagucccgcagucggcguccagcggcucugcuuguucgugugugugucguugcaggccuuauucaagcuuaccaugcaguacaucaaggccaacagcaaauucauuggcaucaccgagcugggguccggaucuggccucgacgggcccuaucaaccuacgagcuuuaagccgcccuccgauuacuggauucugcuuaauccuacaaaccaacaggugguccuggaaggaaccaauaaaacagacaucuggguugcucuccugcuuguggagcccaacgugaccaaucagucucggcaguauacacuguucggcgaaaccaagcagauuacagucgagaacaauaccaacaaauggaaguuuuucgaaauguuucggagcuccgugucugccgaguuccagcacaagcgcacgcucaccagcgauacaaaacuggcgggguuucugaaguucuacaauuccguuuggaccuuuuauggagagacaccucaugcuaccacggacuacagcucuacauccaaccucagcgaaguggagaccgccauccacgucgaguucuauaucauucccagaucucaggaauccaaaugcaaugaguacaucaacacaggccugagcggcggggauauuaucaaacuucugaaugaacaagugaacaaggagaugcagucuuccaaucucuacaugagcauguccucuugguguuauacccauagccuggacggagccggccuuuuucuguucgaucacgcugccgaagaguacgaacaugcuaagaagcucauuaucuuucugaacgagaacaauguuccugugcagcugaccuccauuagcgccccggagcacaaauucgaagggcucacacagaucuuccaaaaggcguaugagcacgaacagcauaucucugaguccauuaacaauaucgucgaccacgccauuaaaagcaaggaucaugcuacguuuaacuuccugcagugguacguggccgaacaacacgaggaggaagugcuuuuuaaagacauccuggauaagauugagcucaucggaaaugaaaaccacggccuguaucuugcugaccaguacgucaaagggaucgccaagucuagaaagagcugaggacuagucccuguucccagagcccacuuuuuuuucuuuuuuugaaauaaaauagccugucuuucagaucuaaaaaaaaaaaaaaaaaaaaaaaaaaaaaaaaaaaaaaaaaaaaaaaaaaaaaaaaaaaaaaaaaaaaaaaaaaaaaaaaaaaaaaaaaaaaaaaaaaaa

SEQ ID NO: 825 - RNA, 1289 nt, Artificial Sequence
  mRNA product Design a-1 (A100) comprising derived and/or modified sequence from RVA/BE1128/P[8]__AEX30671.1__P2_VP8*(65-223)_Ferritin (opt5)
aggagagucccgcagucggcguccagcggcucugcuuguucgugugugugucguugcaggccuuauucaagcuuaccaugcaguacaucaaggccaacagcaaauucauuggcaucaccgagcugggguccggaucuggccucgacgggcccuaucaaccuacaacguuuaccccgcccacagauuacuggauucugaucaccagcaauacaaacggaguggucuaugaauccaccaauaacucugacuucuggacagcuguuauugccguggagccucacgugaaucccgucgauagacaguacaacguguuuggcgaaaauaagcaguucaacguucggaaugacagcgauaaauggaaguuucuugagauguuccgcggguccucucagaacgacuuuuauaauagacggacccugacgagcgauacccgccucgugggaauccugaaauacggcggcagagucuggacauuccauggggaaaccccucgggcgacaaccgacuccagcaacacggcuaaucuugauggaaucucuauuacaauccacuccgaguuuuauauuaucccccgcagccaagagucuaagugcaacgaauacauuaauaacggccuguccgggggagacaucauuaagcuccugaacgaacaggugaauaaagagaugcagagcucuaaccuguacauguccaugagcuccugguguuauacccauucucucgauggcgccgggcuguuccuuuuugaccacgccgcugaggaguacgaacaugccaagaaacugaucaucuuccucaaugagaacaauguuccugugcagcugacaagcauuuccgcuccggaacacaaguuugagggacuuacccaaaucuuccagaaagccuaugaacacgagcagcauauuagcgagucuaucaacaauauugucgaucacgcgaucaaguccaaggaccaugccaccuucaacuuucugcagugguacguggcugaacaacacgaggaagagguccucuucaaagacauccuggauaagauugaacugaucggcaaugagaaccacggccucuaucuggccgaccaguacgugaaagggauugcuaagagcagaaaaucuugaggacuagucccuguucccagagcccacuuuuuuuucuuuuuuugaaauaaaauagccugucuuucagaucuaaaaaaaaaaaaaaaaaaaaaaaaaaaaaaaaaaaaaaaaaaaaaaaaaaaaaaaaaaaaaaaaaaaaaaaaaaaaaaaaaaaaaaaaaaaaaaaaaaaa

SEQ ID NO: 826 - RNA, 1289 nt, Artificial Sequence
  mRNA product Design a-1 (A100) comprising derived and/or modified sequence from RVA/Wa-VirWa/P[8]__ACR22783.1__P2_VP8*(65-223)_Ferritin (opt5)
aggagagucccgcagucggcguccagcggcucugcuuguucgugugugugucguugcaggccuuauucaagcuuaccaugcaguacaucaaggccaacagcaaauucauuggcaucaccgagcugggguccggaucuggccucgacgggcccuaucaaccuacaacguuuaccccgcccaaugauuacuggauucugaucaacagcaauacaaacggagugguguaugaauccaccaauaacucugacuucuggacagcuguuguggccauugagccucacgugaaucccgucgauagacaguacaccaucuuuggcgaaagcaagcaguucaacgugcggaaugacuccaacaaauggaaguuucuugagauguuccgcucuagcucccagaaugaauuuuauaacagacggacacugaccagcgauacgcgccucguugggauccugaaauacggaggcagaguguggaccuuccauggcgagacaccucgggcgaccacagacucuuccagcaccgcuaaucuuaacaauauuucuaucacgauucacuccgaguuuuauaucauuccccgcagccaagaaucuaagugcaacgaguacaucaacaaugggcuguccggaggcgauauuaucaagcuccugaacgaacaggucaauaaagagaugcagagcuccaaccuguacaugucuaugagcuccugguguuauacacauagccucgacggggccggacuguuccuuuuugaucacgccgcugaggaauacgagcaugccaagaaacugaucauuuuccucaaugaaaacaaugugccuguucagcugaccucuaucuccgcuccggagcacaaguuugaaggccuuacacaaauuuuccagaaagccuaugagcacgagcagcauaucagcgaaucuauuaacaauaucguggaccacgcgaucaagagcaaggaucaugccaccuucaacuuucugcagugguacgucgcugagcaacacgaagaggaaguccucuucaaagacauucuggauaagaucgagcugauugggaaugagaaccacggacucuaucuggccgaccaguacgugaaaggcaucgcuaaguccagaaaaucuugaggacuagucccuguucccagagcccacuuuuuuuucuuuuuuugaaauaaaauagccugucuuucagaucuaaaaaaaaaaaaaaaaaaaaaaaaaaaaaaaaaaaaaaaaaaaaaaaaaaaaaaaaaaaaaaaaaaaaaaaaaaaaaaaaaaaaaaaaaaaaaaaaaaaa

SEQ ID NO: 827 - RNA, 1289 nt, Artificial Sequence
  mRNA product Design a-1 (A100) comprising derived and/or modified sequence from RVA/Wa/P[8]__AAA47290.1__P2_VP8*(65-223)_Ferritin (opt5)
aggagagucccgcagucggcguccagcggcucugcuuguucgugugugugucguugcaggccuuauucaagcuuaccaugcaguacaucaaggccaacagcaaauucauuggcaucaccgagcugggguccggaucuggccucgacgggcccuaucaaccuacaacguuuaccccgcccaaugauuacuggauucugaucaacagcaauacaaacggaguggucuaugaauccaccaauaacucugacuucuggacagcuguuguggccauugagccucacgugaaucccgucgauagacaguacaccaucuuuggcgaaagcaagcaguucaacguguccaaugacucuaacaaauggaaguuucuugagauguuccggagcuccagccagaaugaauuuuauaaccgcagaacacugaccucugauacgcgguucguugggauccucaaauacggaggccgcguguggaccuuucauggcgagacaccuagagcgaccacagacuccagcucuaccgcuaaucugaacaauauuuccaucacgauucacagcgaguucuauaucauuccccggucucaagaauccaagugcaacgaguacaucaacaaugggcuuagcggaggcgauauuaucaagcugcucaacgaacaggucaauaaagagaugcaguccucuaaccuguacaugagcauguccagcugguguuauacacauucucuggacggggccggacucuuucuguucgaucacgccgcugaggaauacgagcaugccaagaaacuuaucauuuuucugaaugaaaacaaugugccuguucagcucaccuccaucagcgcuccggagcacaaguucgaaggccugacacaaauuuuccagaaagccuaugagcacgagcagcauaucucugaaagcauuaacaauaucguggaccacgcgaucaaguccaaggaucaugccaccuuuaacuuccuucagugguacgucgcugagcaacacgaagaggaagugcuguuuaaagacauucucgauaagaucgagcugauugggaaugagaaccacggacuguaucucgccgaccaguacgugaaaggcaucgcuaagucucgcaaaagcugaggacuagucccuguucccagagcccacuuuuuuuucuuuuuuugaaauaaaauagccugucuuucagaucuaaaaaaaaaaaaaaaaaaaaaaaaaaaaaaaaaaaaaaaaaaaaaaaaaaaaaaaaaaaaaaaaaaaaaaaaaaaaaaaaaaaaaaaaaaaaaaaaaaaa

SEQ ID NO: 828 - RNA, 1289 nt, Artificial Sequence; identical to SEQ ID NO: 827
  mRNA product Design a-1 (A100) comprising derived and/or modified sequence from RVA/Wa/P[8]__AAA66953.1__P2_VP8*(65-223)_Ferritin (opt5)

SEQ ID NO: 829 - RNA, 1361 nt, Artificial Sequence
  mRNA product Design a-1 (A100) comprising derived and/or modified sequence from RVA/BE1058/P[4]__AEX30665.1__P2_VP8*(41-223)_Ferritin (opt5)
aggagagucccgcagucggcguccagcggcucugcuuguucgugugugugucguugcaggccuuauucaagcuuaccaugcaguacaucaaggccaacagcaaauucauuggcaucaccgagcugggguccggaucuggcgcucaaacaagauaugcccccgugaauugggggcacggagaaauuaacgacagcacgaccgucgagccuguucucgauggcccguaccagcccacaaccuuuaagccucccaaugacuauuggcugcuuaucuccucuaacacagauggggugguguacgaaagcaccaauaacuccgacuucuggacagcggucauugcuguggagccucauguuaaucagaccaaccggcaguaugugcuguuuggagaaaauaaacaauucaacaucgaaaauucuagcgauaaguggaaauuuuucgagauguuuaagggcaacucccagagcgacuucucuaaucgcagaacgcucaccuccagcaaccggcuggucggcaugcuuaaguacgggggacgcguguggacauuucacggcgagacccccagagccacaaccgauucuuccagcacggccgaccugaauaacaucucuauuaucauucauuccgaguucuauaucauuccucggagccaggaauccaaaugcaacgaguacaucaauaacgggcucucuggaggcgauauuaucaagcugcugaaugagcagguuaacaaagaaaugcaaagcuccaaucucuacaugagcaugucuuccugguguuauacacacagccuggacggggcuggacuuuuucuguucgaucaugccgcugaggaauacgagcacgccaagaaacucaucauuuuucugaacgaaaauaacgugccgguccagcuuaccucuaucagcgcgcccgagcacaaguucgagggccugacacagauuuuccagaaggccuaugaacaugagcaacacaucuccgaaucuauuaauaacaucguggaccaugcuaucaaaagcaaggaucacgccaccuuuaauuuccuccagugguacguggcugagcagcacgaagaggagguccuguuuaaagacauucuggacaagaucgaacucauuggcaacgagaaucaugggcuguaucuugccgaucaauacguuaaaggaaucgcgaagucccgcaaaagcugaggacuagucccuguucccagagcccacuuuuuuuucuuuuuuugaaauaaaauagccugucuuucagaucuaaaaaaaaaaaaaaaaaaaaaaaaaaaaaaaaaaaaaaaaaaaaaaaaaaaaaaaaaaaaaaaaaaaaaaaaaaaaaaaaaaaaaaaaaaaaaaaaaaaa

SEQ ID NO: 830 - RNA, 1361 nt, Artificial Sequence
  mRNA product Design a-1 (A100) comprising derived and/or modified sequence from RVA/DS-1/P[4]__CAD62680.1__P2_VP8*(41-223)_Ferritin (opt5)
aggagagucccgcagucggcguccagcggcucugcuuguucgugugugugucguugcaggccuuauucaagcuuaccaugcaguacaucaaggccaacagcaaauucauuggcaucaccgagcugggguccggaucuggcgcucaaacaagauaugcccccgugaauugggggagcugggaaauuaacgacuccacgaccgucgagccuguucucgauggaccguaccagcccacaaccuuuaagccucccaaugacuauuggcugcuuaucucuagcaacacaaauggcgugguguacgaauccaccaacaauaacgauuucuggacagcggucucuagcguggagccucacguuucccagaccaaucggcaguauauucuguuuggggaaaacaaacaauucaauguggagaacaauagcgacaaguggaaauuuuucgagacguuuaccggaucuucccagggcaacuucagcaaucgcagaacacucaccucuuccaaccggcuggucggcaugcuuaaguacgggggacgcguguggacauuucauggcgaaacccccagagcuacgacagauagcucuaacaccgccgaccugaauaacaucuccaucauuauccacagcgaguucuauauuaucccucggucccaggaaucuaagugcaaugaguacauuaacaaugggcucagcggaggcgauaucauuaaacugcugaacgagcagguuaauaaggaaaugcaauccagcaaccucuacaugucuauguccagcugguguuauacacauucucuggacggggccggacuuuuucuguucgaucacgcugccgaggaauacgagcaugcuaaaaagcucaucaucuuucugaaugaaaacaaugugccgguccagcuuaccagcauuuccgcccccgagcacaaauucgagggccugacccagaucuuccagaaggcguaugaacacgagcaacauauuucugaaagcaucaacaauauuguggaccacgccaucaaguccaaagaucaugcuacauuuaacuuccuccagugguacguggccgagcagcacgaagaggagguccuguuuaaggacauccuggauaaaauugaacucaucggcaaugagaaccacgggcuguaucuugcugaccaauacguuaagggaauugccaaaagccgcaagucuugaggacuagucccuguucccagagcccacuuuuuuuucuuuuuuugaaauaaaauagccugucuuucagaucuaaaaaaaaaaaaaaaaaaaaaaaaaaaaaaaaaaaaaaaaaaaaaaaaaaaaaaaaaaaaaaaaaaaaaaaaaaaaaaaaaaaaaaaaaaaaaaaaaaaa

SEQ ID NO: 831 - RNA, 1361 nt, Artificial Sequence; identical to SEQ ID NO: 830
  mRNA product Design a-1 (A100) comprising derived and/or modified sequence from RVA/DS-1/P[4]__ABV53252.1__P2_VP8*(41-223)_Ferritin (opt5)

SEQ ID NO: 832 - RNA, 1361 nt, Artificial Sequence
  mRNA product Design a-1 (A100) comprising derived and/or modified sequence from RVA/F01322/P[6]__AFA51886.1__P2_VP8*(41-223)_Ferritin (opt5)
aggagagucccgcagucggcguccagcggcucugcuuguucgugugugugucguugcaggccuuauucaagcuuaccaugcaguacaucaaggccaacagcaaauucauuggcaucaccgagcugggguccggaucuggcgcucaaacaaauuaugcccccgugacguggagccacggggaagucaacgacuccaccacaauugagccuguucucgauggaccguaccagcccaccaauuuuaagccucccaacgacuauuggauccugcuuaauccuacaaaccaacagguggugcuggaaggcaccaauaaaacagauauuugggucgcgcuccugcuuguggagcccaacguuaccaaucagucucggcaguacacgcuguucggggaaaccaagcagaucacaguggagaacaauaccaacaaauggaaguuuuucgagauguuucggagcuccgucucugcugaguuccagcauaagcgcacacucaccagcgacacgaaacuggccggauuuaugaaguucuauaauuccguguggacauuucacggcgaaaccccuaacgccacaaccgauuacagcucuaccuccaaucuguucgaaguugagacagugauccaugucgaguuuuauauuaucccgagaagccaagaaucuaaaugcuccgaguacauuaacacgggccucagcgggggagacaucauuaagcugcuuaacgaacaggugaauaaagagaugcagucuuccaaccuguacaugagcauguccucuugguguuauacccacagccucgauggcgcugggcuguuccuuuuugaccaugccgcugaagaguacgagcacgccaagaagcugaucauuuuccucaaugaaaacaaugugcccguccagcugacauccaucagcgcgccugagcacaaauucgaaggacugacccaaaucuuucagaaggccuaugagcaugaacagcacauuucugaguccaucaacaauauuguugaucaugcuaucaaaagcaaggaccacgccacauucaacuuucuccaaugguacguggcugagcagcacgaagaggaagugcuguucaaagauauucuugacaagaucgagcugaucggcaaugaaaaccaugggcucuaucuggccgaucaguacgucaaaggaauugcgaagucuagaaagagcugaggacuagucccuguucccagagcccacuuuuuuuucuuuuuuugaaauaaaauagccugucuuucagaucuaaaaaaaaaaaaaaaaaaaaaaaaaaaaaaaaaaaaaaaaaaaaaaaaaaaaaaaaaaaaaaaaaaaaaaaaaaaaaaaaaaaaaaaaaaaaaaaaaaaa

SEQ ID NO: 833 - RNA, 1361 nt, Artificial Sequence
  mRNA product Design a-1 (A100) comprising derived and/or modified sequence from RVA/1076/P[6]__AAA47337.1__P2_VP8*(41-223)_Ferritin (opt5)
aggagagucccgcagucggcguccagcggcucugcuuguucgugugugugucguugcaggccuuauucaagcuuaccaugcaguacaucaaggccaacagcaaauucauuggcaucaccgagcugggguccggaucuggcgcucaaacaaauuaugcccccgugacguggagccacggggaagucaacgacuccaccacaauugagccuguucucgauggaccguaccagcccaccucuuuuaagccucccagcgacuauuggauccugcuuaauccuacaaaccaacagguggugcuggaaggcaccaauaaaacagauauuugggucgcgcuccugcuuguggagcccaacguuaccaaucaguccagacaguacacgcuguucggggaaaccaagcagaucacaguggagaacaauaccaacaaauggaaguuuuucgagauguuucggucuagcgucuccgcugaguuccagcauaagcgcacacucaccagcgacacgaaacuggccggauuucugaaguucuauaauucuguguggacauuuuacggcgaaaccccucacgccacaaccgauuauuccagcaccucuaaccucuccgaaguugagacagcuauccauguggaguucuacauuaucccgagaagccaagaaucuaaaugcaaugaguacauuaacacgggccuguccgggggagacaucauuaaacuucugaaugaacaggucaacaaggagaugcagagcuccaaccucuauaugucuaugagcuccugguguuacacccacagccuggauggcgccgggcuuuuucuguucgaccaugcugccgaagaguaugagcacgcgaagaagcucaucauuuuucugaaugaaaacaaugugcccgugcagcugacaucuaucuccgccccugagcacaaauucgaaggacucacccaaaucuuccagaaggcuuacgagcaugaacagcacauuagcgagucuaucaacaauauugucgaucaugccaucaaaagcaaggaccacgcuacauuuaacuuccugcaaugguauguugccgagcagcacgaagaggaagugcuuuuuaaagauauucuggacaagaucgagcucaucggcaaugaaaaccaugggcuguaccuugcggaucaguaugugaaaggaauugccaagucccggaagucuugaggacuagucccuguucccagagcccacuuuuuuuucuuuuuuugaaauaaaauagccugucuuucagaucuaaaaaaaaaaaaaaaaaaaaaaaaaaaaaaaaaaaaaaaaaaaaaaaaaaaaaaaaaaaaaaaaaaaaaaaaaaaaaaaaaaaaaaaaaaaaaaaaaaaa

SEQ ID NO: 834 - RNA, 1361 nt, Artificial Sequence
  mRNA product Design a-1 (A100) comprising derived and/or modified sequence from RVA/BE1128/P[8]__AEX30671.1__P2_VP8*(41-223)_Ferritin (opt5)
aggagagucccgcagucggcguccagcggcucugcuuguucgugugugugucguugcaggccuuauucaagcuuaccaugcaguacaucaaggccaacagcaaauucauuggcaucaccgagcugggguccggaucuggcgcucaaacaagauaugcccccgugaauugggggcacggagaaauuaacgacagcacgaccgucgagccuauccucgauggcccguaccagcccacaaccuuuacaccucccaccgacuauuggauucugaucacauccaauaccaacgggguuguguacgaaucuacgaauaacagcgauuucuggaccgcggugaucgcugucgagccucaugugaaucccguugaccggcaguauaacguguuuggagaaaauaagcaguucaacguccgcaaugauuccgacaaauggaaguuucuugagauguucagaggcucuagccaaaacgauuuuuacaaucggcgcacacugaccuccgacacaagacucgugggcauucugaaauaugggggacggguuuggaccuuccacggcgagacgccucgcgccacaaccgauagcucuaacacagccaaucuugacgggaucuccauuaccauccauagcgaauuuuacauuaucccgagaucucaggaguccaagugcaacgaauacauuaacaauggacugagcggcggggauaucaucaagcuccugaacgaacaggugaauaaagagaugcagucuuccaaccuguauaugagcauguccucuugguguuacacccacagccucgacggagcuggccuguuccuuuuugaucaugccgcugaggaguaugaacacgccaagaaacugauuaucuuccucaaugagaacaauguccccgugcaacugacauccauuagcgcgccugaacacaaguuugagggccuuacgcagaucuuccagaaagccuacgagcaugaacagcacauuucugaguccaucaacaauaucguggaccaugcuauuaagagcaaggaccacgccaccuucaacuuucugcaaugguaugucgcugaacagcacgaggaagagguucucuucaaagauauccuggacaagauugagcugaucgggaaugaaaaccauggacucuaccuggccgaucaguaugugaaaggcauugcgaagucucggaaaagcugaggacuagucccuguucccagagcccacuuuuuuuucuuuuuuugaaauaaaauagccugucuuucagaucuaaaaaaaaaaaaaaaaaaaaaaaaaaaaaaaaaaaaaaaaaaaaaaaaaaaaaaaaaaaaaaaaaaaaaaaaaaaaaaaaaaaaaaaaaaaaaaaaaaaa

SEQ ID NO: 835 - RNA, 1361 nt, Artificial Sequence
  mRNA product Design a-1 (A100) comprising derived and/or modified sequence from RVA/Wa-VirWa/P[8]__ACR22783.1__P2_VP8*(41-223)_Ferritin (opt5)
aggagagucccgcagucggcguccagcggcucugcuuguucgugugugugucguugcaggccuuauucaagcuuaccaugcaguacaucaaggccaacagcaaauucauuggcaucaccgagcugggguccggaucuggcgcucaaacaagauaugcccccgugaauugggggcacggagaaauuaacgacagcacgaccgucgagccuauccucgauggcccguaccagcccacaaccuuuacaccucccaaugacuauuggauucugaucaacuccaauaccaacgggguuguguacgaaucuacaaauaacagcgauuucuggaccgcgguggucgcuaucgagccucaugugaaucccguugaccggcaguauacgauuuuuggagaauccaagcaguucaacgugcgcaaugauucuaacaaauggaaguuucuugagauguucagaagcuccagccaaaaugaguuuuacaaccggcgcacccugacaucugacaccagacucgucggcauccugaaauauggcgggcggguguggacauuccacggagaaaccccucgcgccacgacagauuccagcucuaccgccaaucuuaacaacauuuccaucacaauucauagcgaguuuuacaucauuccgagaucucaggaauccaagugcaaugaguacaucaacaauggccugagcgggggagacaucauuaagcuccugaacgagcagguuaauaaagaaaugcaguccucuaaccuguauaugagcauguccagcugguguuacacccacucucucgauggcgcugggcuguuccuuuuugaccaugccgcugaggaauaugagcacgccaagaaacugaucauuuuccucaaugaaaacaaugugcccguccaacugaccuccaucagcgcgccugagcacaaguuugagggacuuacacagauuuuccagaaagccuacgaacaugagcagcacaucucugaaagcaucaacaauauuguggaucaugcuaucaaguccaaggaccacgccacguucaacuuucugcaaugguauguggcugagcagcacgaagaggagguccucuucaaagauauucuggacaagaucgaacugauuggcaaugagaaccauggccucuaccuggccgaccaguauguuaaagggaucgcgaagucucggaaaagcugaggacuagucccuguucccagagcccacuuuuuuuucuuuuuuugaaauaaaauagccugucuuucagaucuaaaaaaaaaaaaaaaaaaaaaaaaaaaaaaaaaaaaaaaaaaaaaaaaaaaaaaaaaaaaaaaaaaaaaaaaaaaaaaaaaaaaaaaaaaaaaaaaaaaa

SEQ ID NO: 836 - RNA, 1361 nt, Artificial Sequence
  mRNA product Design a-1 (A100) comprising derived and/or modified sequence from RVA/Wa/P[8]__AAA47290.1__P2_VP8*(41-223)_Ferritin (opt5)
aggagagucccgcagucggcguccagcggcucugcuuguucgugugugugucguugcaggccuuauucaagcuuaccaugcaguacaucaaggccaacagcaaauucauuggcaucaccgagcugggguccggaucuggcgcucaaacaagauaugcccccgugaauugggggcacggagaaauuaacgacagcacgaccgucgagccuauccucgauggcccguaccagcccacaaccuuuacaccucccaaugacuauuggauucugaucaacuccaauaccaacgggguuguguacgaaucuacaaauaacagcgauuucuggaccgcgguggucgcuaucgagccucaugugaaucccguugaccggcaguauacgauuuuuggagaauccaagcaguucaacgugucuaaugauagcaacaaauggaaguuucuugagauguuccgcuccagcucucaaaaugaguuuuacaacagacggacccugacauccgacacccgcuucgucggcauccucaaauauggcgggagaguguggacauuucacggagaaaccccucgggccacgacagauagcagcuccaccgccaaucugaacaacauuagcaucacaauucauucugaguucuacaucauuccgcgcucccaggaaagcaagugcaaugaguacaucaacaauggccuuuccgggggagacaucauuaagcugcucaacgagcagguuaauaaagaaaugcagucuagcaaccuguauauguccaugagcucuugguguuacacccacucccuggauggcgcugggcucuuucuguucgaccaugccgcugaggaauaugagcacgccaagaaacuuaucauuuuucugaaugaaaacaaugugcccguccaacucaccagcaucucugcgccugagcacaaguucgagggacugacacagauuuuccagaaagccuacgaacaugagcagcacaucagcgaauccaucaacaauauuguggaucaugcuaucaagucuaaggaccacgccacguuuaacuuccuucaaugguauguggcugagcagcacgaagaggagguccuguuuaaagauauucucgacaagaucgaacugauuggcaaugagaaccauggccuguaccucgccgaccaguauguuaaagggaucgcgaagucuagaaaauccugaggacuagucccuguucccagagcccacuuuuuuuucuuuuuuugaaauaaaauagccugucuuucagaucuaaaaaaaaaaaaaaaaaaaaaaaaaaaaaaaaaaaaaaaaaaaaaaaaaaaaaaaaaaaaaaaaaaaaaaaaaaaaaaaaaaaaaaaaaaaaaaaaaaaa

SEQ ID NO: 837 - RNA, 1361 nt, Artificial Sequence
  mRNA product Design a-1 (A100) comprising derived and/or modified sequence from RVA/Wa/P[8]__AAA66953.1__P2_VP8*(41-223)_Ferritin (opt5)
aggagagucccgcagucggcguccagcggcucugcuuguucgugugugugucguugcaggccuuauucaagcuuaccaugcaguacaucaaggccaacagcaaauucauuggcaucaccgagcugggguccggaucuggcgcucaaacaagauaugcccccgugaauugggggcacggagaaauuaacgacagcacgaccgucgagccuaugcucgauggcccguaccagcccacaaccuuuacaccucccaaugacuauuggauccugauuaacuccaauaccaacgggguuguguacgaaucuacaaauaacagcgauuucuggaccgcgguggucgcuaucgagccucaugugaaucccguugaccggcaguauacgaucuuuggagaauccaagcaguucaacgugucuaaugauagcaacaaauggaaguuucuugagauguuccgcuccagcucucaaaaugaguuuuacaacagacggacccugacauccgacacccgcuucgucggcauucucaaauauggcgggagaguguggacauuucacggagaaaccccucgggccacgacagauagcagcuccaccgccaaucugaacaacaucagcauuacaauccauucugaguucuacauuaucccgcgcucccaggaaagcaagugcaaugaguacauuaacaauggccuuuccgggggagacaucaucaagcugcucaacgagcagguuaauaaagaaaugcagucuagcaaccuguauauguccaugagcucuugguguuacacccacucccuggauggcgcugggcucuuucuguucgaccaugccgcugaggaauaugagcacgccaagaaacuuauuaucuuucugaaugaaaacaaugugcccguccaacucaccagcauuucugcgccugagcacaaguucgagggacugacacagaucuuccagaaagccuacgaacaugagcagcacauuagcgaauccaucaacaauaucguggaucaugcuauuaagucuaaggaccacgccacguuuaacuuccuucaaugguauguggcugagcagcacgaagaggagguccuguuuaaagauauccucgacaagauugaacugaucggcaaugagaaccauggccuguaccucgccgaccaguauguuaaagggauugcgaagucuagaaaauccugaggacuagucccuguucccagagcccacuuuuuuuucuuuuuuugaaauaaaauagccugucuuucagaucuaaaaaaaaaaaaaaaaaaaaaaaaaaaaaaaaaaaaaaaaaaaaaaaaaaaaaaaaaaaaaaaaaaaaaaaaaaaaaaaaaaaaaaaaaaaaaaaaaaaa

SEQ ID NO: 838 - RNA, 1295 nt, Artificial Sequence
  mRNA product Design a-1 (A100) comprising derived and/or modified sequence from RVA/BE1058/P[4]__AEX30665.1__LumSynt_P2_VP8*(65-223) (opt5)
aggagagucccgcagucggcguccagcggcucugcuuguucgugugugugucguugcaggccuuauucaagcuuaccaugcagaucuacgagggcaagcugaccgccgaagggcucagauucggaauuguggcuagccgguuuaaccacgcccuggucgaccgccuuguugagggcgcgaucgaugcuauugugagacaugggggacgggaagaggacaucacacuggugcgcguccccggcuccugggaaauuccuguggccgccggggagcucgcuagaaaagaggauaucgacgccguuaucgcuauuggagugcugauccggggcgccacgccgcacuucgauuauauugcgucugaagucagcaagggccuugccgaccugucccucgagcugcgcaaacccaucaccuuuggggugauuacagcugauacccuggaacaagccaucgagagagcuggaacaaagcauggcaauaaagggugggaggccgcgcucucugccauugaaauggcuaaccuguucaagagccuucggggaggcuccgggggaucuggcggcagcgggggauccggcgggggacaguacaucaaggccaauagcaaauuuaucggcauuaccgagcuggggucuggauccggccucgacggcccuuaucagcccacaaccuucaagccucccaacgauuacuggcugcuuaucagcucuaauacggacgggguuguguaugaauccaccaacaauagcgauuuuuggacagcugucauugccguggagccucacgugaaccagaccaaucgccaauacguccuguucggagaaaacaaacaguuuaauaucgagaacucuuccgacaaguggaaauucuuugagauguucaagggcaauagccaguccgauuuuucuaacagacggacacucaccagcuccaaucgccugguugggaugcugaaguauggaggcagaguguggacguuccauggggaaacaccgcgggccaccacagacucuagcuccaccgcugaccucaacaacauuagcaucaucauucacucugaguucuacaucauuccccgcagccaggaauccaaaugcaaugaguacaucaacaauggccugugaggacuagucccuguucccagagcccacuuuuuuuucuuuuuuugaaauaaaauagccugucuuucagaucuaaaaaaaaaaaaaaaaaaaaaaaaaaaaaaaaaaaaaaaaaaaaaaaaaaaaaaaaaaaaaaaaaaaaaaaaaaaaaaaaaaaaaaaaaaaaaaaaaaaa

SEQ ID NO: 839 - RNA, 1295 nt, Artificial Sequence
  mRNA product Design a-1 (A100) comprising derived and/or modified sequence from RVA/DS-1/P[4]__CAD62680.1__LumSynt_P2_VP8*(65-223) (opt5)
aggagagucccgcagucggcguccagcggcucugcuuguucgugugugugucguugcaggccuuauucaagcuuaccaugcagaucuacgagggcaagcugaccgccgaagggcucagauucggaauuguggcuagccgguuuaaccacgcccuggucgaccgccuuguugagggcgcgaucgaugcuauugugagacaugggggacgggaagaggacaucacacuggugcgcguccccggcuccugggaaauuccuguggccgccggggagcucgcuagaaaagaggauaucgacgccguuaucgcuauuggagugcugauccggggcgccacgccgcacuucgauuauauugcgucugaagucagcaagggccuugccgaccugucccucgagcugcgcaaacccaucaccuuuggggugauuacagcugauacccuggaacaagccaucgagagagcuggaacaaagcauggcaauaaagggugggaggccgcgcucucugccauugaaauggcuaaccuguucaagagccuucggggaggcuccgggggaucuggcggcagcgggggauccggcgggggacaguacaucaaggccaauagcaaauuuaucggcauuaccgagcuggggucuggauccggccucgacggcccuuaucagcccacaaccuucaagccucccaacgauuacuggcugcuuaucagcucuaauacgaacgggguuguguaugaauccaccaauaacaaugacuuuuggacagcugucagcucuguggagccucacgugucccagaccaaccgccaauacauucuguucggagaaaauaaacaguuuaacgucgagaauaacagcgauaaguggaaauucuuugagacauucaccggcuccucucaggggaauuuuagcaacagacggacgcucacauccagcaaccgccugguuggaaugcugaaguauggcgggagaguguggaccuuccauggcgaaacaccgcgggccaccaccgacucuuccaauacagccgaucucaacaauaucagcauuaucauccacucugaguucuacauuaucccccgcagccaggaauccaagugcaacgaguacauuaauaacggacugugaggacuagucccuguucccagagcccacuuuuuuuucuuuuuuugaaauaaaauagccugucuuucagaucuaaaaaaaaaaaaaaaaaaaaaaaaaaaaaaaaaaaaaaaaaaaaaaaaaaaaaaaaaaaaaaaaaaaaaaaaaaaaaaaaaaaaaaaaaaaaaaaaaaaa

SEQ ID NO: 840 - RNA, 1295 nt, Artificial Sequence; identical to SEQ ID NO: 839
  mRNA product Design a-1 (A100) comprising derived and/or modified sequence from RVA/DS-1/P[4]__ABV53252.1__LumSynt_P2_VP8*(65-223) (opt5)

SEQ ID NO: 841 - RNA, 1295 nt, Artificial Sequence
  mRNA product Design a-1 (A100) comprising derived and/or modified sequence from RVA/F01322/P[6]__AFA51886.1__LumSynt_P2_VP8*(65-223) (opt5)
aggagagucccgcagucggcguccagcggcucugcuuguucgugugugugucguugcaggccuuauucaagcuuaccaugcagaucuacgagggcaagcugaccgccgaagggcucagauucggaauuguggcuagccgguuuaaccacgcccuggucgaccgccuuguugagggcgcgaucgaugcuauugugagacaugggggacgggaagaggacaucacacuggugcgcguccccggcuccugggaaauuccuguggccgccggggagcucgcuagaaaagaggauaucgacgccguuaucgcuauuggagugcugauccggggcgccacgccgcacuucgauuauauugcgucugaagucagcaagggccuugccgaccugucccucgagcugcgcaaacccaucaccuuuggggugauuacagcugauacccuggaacaagccaucgagagagcuggaacaaagcauggcaauaaagggugggaggccgcgcucucugccauugaaauggcuaaccuguucaagagccuucggggaggcuccgggggaucuggcggcagcgggggauccggcgggggacaguacaucaaggccaauagcaaauuuaucggcauuaccgagcuggggucuggauccggccucgacggcccuuaucagcccacaaacuucaagccucccaaugauuacuggauccugcuuaacccuaccaaucagcaaguugugcuggaagggacgaacaaaaccgacauuugggucgcucuccugcugguggagccgaaugugacaaaccagagccgccaguauacccucuuuggagaaacaaagcagaucaccgucgagaauaacacgaauaaauggaaguucuuugagauguucagaucuuccguuagcgccgaauuucaacacaagcggacacugaccucugauacaaaacuugccggcuucaugaaguuuuacaacuccguguggaccuuccauggggagacccccaaugcuacaacggacuauagcuccaccucuaaccuguucgaaguggagacagucauucacguggaauuuuacaucaucccucgcagccaggaguccaaaugcagcgaguacauuaacaccggacucugaggacuagucccuguucccagagcccacuuuuuuuucuuuuuuugaaauaaaauagccugucuuucagaucuaaaaaaaaaaaaaaaaaaaaaaaaaaaaaaaaaaaaaaaaaaaaaaaaaaaaaaaaaaaaaaaaaaaaaaaaaaaaaaaaaaaaaaaaaaaaaaaaaaaa

SEQ ID NO: 842 - RNA, 1295 nt, Artificial Sequence
  mRNA product Design a-1 (A100) comprising derived and/or modified sequence from RVA/1076/P[6]__AAA47337.1__LumSynt_P2_VP8*(65-223) (opt5)
aggagagucccgcagucggcguccagcggcucugcuuguucgugugugugucguugcaggccuuauucaagcuuaccaugcagaucuacgagggcaagcugaccgccgaagggcucagauucggaauuguggcuagccgguuuaaccacgcccuggucgaccgccuuguugagggcgcgaucgaugcuauugugagacaugggggacgggaagaggacaucacacuggugcgcguccccggcuccugggaaauuccuguggccgccggggagcucgcuagaaaagaggauaucgacgccguuaucgcuauuggagugcugauccggggcgccacgccgcacuucgauuauauugcgucugaagucagcaagggccuugccgaccugucccucgagcugcgcaaacccaucaccuuuggggugauuacagcugauacccuggaacaagccaucgagagagcuggaacaaagcauggcaauaaagggugggaggccgcgcucucugccauugaaauggcuaaccuguucaagagccuucggggaggcuccgggggaucuggcggcagcgggggauccggcgggggacaguacaucaaggccaauagcaaauuuaucggcauuaccgagcuggggucuggauccggccucgacggcccuuaucagcccaccagcuucaagccucccucugauuacuggauccugcuuaacccuaccaaucagcaaguugugcuggaagggacgaacaaaaccgacauuugggucgcucuccugcugguggagccgaaugugacaaaccagucccgccaguauacccucuuuggagaaacaaagcagaucaccgucgagaauaacacgaauaaauggaaguucuuugagauguucagaagcucuguuuccgccgaauuucaacacaagcggacacugaccagcgauacaaaacuugccggcuuccugaaguuuuacaacuccguguggaccuucuauggggagacaccccaugcuacaacggacuacucuagcaccuccaaucucagcgaaguggagacagcgauucacgucgaguucuacaucaucccucgcucucaggaauccaaaugcaacgaguauauuaauaccggacugugaggacuagucccuguucccagagcccacuuuuuuuucuuuuuuugaaauaaaauagccugucuuucagaucuaaaaaaaaaaaaaaaaaaaaaaaaaaaaaaaaaaaaaaaaaaaaaaaaaaaaaaaaaaaaaaaaaaaaaaaaaaaaaaaaaaaaaaaaaaaaaaaaaaaa

SEQ ID NO: 843 - RNA, 1295 nt, Artificial Sequence
  mRNA product Design a-1 (A100) comprising derived and/or modified sequence from RVA/BE1128/P[8]__AEX30671.1__LumSynt_P2_VP8*(65-223) (opt5)
aggagagucccgcagucggcguccagcggcucugcuuguucgugugugugucguugcaggccuuauucaagcuuaccaugcagaucuacgagggcaagcugaccgccgaagggcucagauucggaauuguggcuagccgguuuaaccacgcccuggucgaccgccuuguugagggcgcgaucgaugcuauugugagacaugggggacgggaagaggacaucacacuggugcgcguccccggcuccugggaaauuccuguggccgccggggagcucgcuagaaaagaggauaucgacgccguuaucgcuauuggagugcugauccggggcgccacgccgcacuucgauuauauugcgucugaagucagcaagggccuugccgaccugucccucgagcugcgcaaacccaucaccuuuggggugauuacagcugauacccuggaacaagccaucgagagagcuggaacaaagcauggcaauaaagggugggaggccgcgcucucugccauugaaauggcuaaccuguucaagagccuucggggaggcuccgggggaucuggcggcagcgggggauccggcgggggacaguacaucaaggccaauagcaaauuuaucggcauuaccgagcuggggucuggauccggccucgacggcccuuaucagcccacaaccuucacgccucccaccgauuacuggauccugauuacaagcaacaccaaugggguuguguaugaaucuacaaacaauuccgacuuuuggaccgcugucaucgccguggagccucacgugaacccggucgaucgccaguacaauguuuucggagaaaacaagcaauuuaaugugagaaacgacagcgauaaauggaaguuccuugagauguuucgggggucuucccagaaugacuucuauaaccgcagaacgcugacaagcgacacccggcucgugggcauucugaaauacggaggccgcgucuggacauuucauggggagacccccagagccaccacagauuccucuaauacggcuaaccuggacggcaucagcaucaccauucacuccgaguucuacaucauuccucggagccaggaaucuaagugcaacgaauauaucaauaacggacucugaggacuagucccuguucccagagcccacuuuuuuuucuuuuuuugaaauaaaauagccugucuuucagaucuaaaaaaaaaaaaaaaaaaaaaaaaaaaaaaaaaaaaaaaaaaaaaaaaaaaaaaaaaaaaaaaaaaaaaaaaaaaaaaaaaaaaaaaaaaaaaaaaaaaa

SEQ ID NO: 844 - RNA, 1295 nt, Artificial Sequence
  mRNA product Design a-1 (A100) comprising derived and/or modified sequence from RVA/Wa-VirWa/P[8]__ACR22783.1__LumSynt_P2_VP8*(65-223) (opt5)
aggagagucccgcagucggcguccagcggcucugcuuguucgugugugugucguugcaggccuuauucaagcuuaccaugcagaucuacgagggcaagcugaccgccgaagggcucagauucggaauuguggcuagccgguuuaaccacgcccuggucgaccgccuuguugagggcgcgaucgaugcuauugugagacaugggggacgggaagaggacaucacacuggugcgcguccccggcuccugggaaauuccuguggccgccggggagcucgcuagaaaagaggauaucgacgccguuaucgcuauuggagugcugauccggggcgccacgccgcacuucgauuauauugcgucugaagucagcaagggccuugccgaccugucccucgagcugcgcaaacccaucaccuuuggggugauuacagcugauacccuggaacaagccaucgagagagcuggaacaaagcauggcaauaaagggugggaggccgcgcucucugccauugaaauggcuaaccuguucaagagccuucggggaggcuccgggggaucuggcggcagcgggggauccggcgggggacaguacaucaaggccaauagcaaauuuaucggcauuaccgagcuggggucuggauccggccucgacggcccuuaucagcccacaaccuucacgccucccaacgauuacuggauccugauuaauagcaacaccaaugggguuguguaugaaucuacaaacaauuccgacuuuuggaccgcugucguggccaucgagccucacgugaacccggucgaucgccaguacacaauuuucggagaaagcaagcaauuuaauguuagaaacgacucuaauaaauggaaguuccuugagauguuucgguccagcucccagaacgaguucuauaaucgcagaacccugacgucugauacacggcucgugggcauccugaaauacgggggacgcguguggaccuuucauggcgaaacacccagagccaccaccgacagcuccagcacagcuaaccugaacaauaucucuauuacgauccacuccgaguucuacauuaucccucggagccaggaaucuaagugcaacgaguauauuaauaacgggcucugaggacuagucccuguucccagagcccacuuuuuuuucuuuuuuugaaauaaaauagccugucuuucagaucuaaaaaaaaaaaaaaaaaaaaaaaaaaaaaaaaaaaaaaaaaaaaaaaaaaaaaaaaaaaaaaaaaaaaaaaaaaaaaaaaaaaaaaaaaaaaaaaaaaaa

SEQ ID NO: 845 - RNA, 1295 nt, Artificial Sequence
  mRNA product Design a-1 (A100) comprising derived and/or modified sequence from RVA/Wa/P[8]__AAA47290.1__LumSynt_P2_VP8*(65-223) (opt5)
aggagagucccgcagucggcguccagcggcucugcuuguucgugugugugucguugcaggccuuauucaagcuuaccaugcagaucuacgagggcaagcugaccgccgaagggcucagauucggaauuguggcuagccgguuuaaccacgcccuggucgaccgccuuguugagggcgcgaucgaugcuauugugagacaugggggacgggaagaggacaucacacuggugcgcguccccggcuccugggaaauuccuguggccgccggggagcucgcuagaaaagaggauaucgacgccguuaucgcuauuggagugcugauccggggcgccacgccgcacuucgauuauauugcgucugaagucagcaagggccuugccgaccugucccucgagcugcgcaaacccaucaccuuuggggugauuacagcugauacccuggaacaagccaucgagagagcuggaacaaagcauggcaauaaagggugggaggccgcgcucucugccauugaaauggcuaaccuguucaagagccuucggggaggcuccgggggaucuggcggcagcgggggauccggcgggggacaguacaucaaggccaauagcaaauuuaucggcauuaccgagcuggggucuggauccggccucgacggcccuuaucagcccacaaccuucacgccucccaacgauuacuggauccugauuaauagcaacaccaaugggguuguguaugaaucuacaaacaauuccgacuuuuggaccgcugucguggccaucgagccucacgugaacccggucgaucgccaguacacaauuuucggagaaagcaagcaauuuaauguuucuaacgacuccaauaaauggaaguuccuugagauguuuagaagcuccucucagaacgaguucuauaaucggcgcacccugacgagcgauacaagauuugugggcauccucaaauacgggggacggguguggaccuuccauggcgaaacaccccgcgccaccaccgacuccagcucuacagcuaaccugaacaauaucuccauuacgauccacagcgaguucuacauuaucccuagaucucaggaaagcaagugcaacgaguauauuaauaacgggcugugaggacuagucccuguucccagagcccacuuuuuuuucuuuuuuugaaauaaaauagccugucuuucagaucuaaaaaaaaaaaaaaaaaaaaaaaaaaaaaaaaaaaaaaaaaaaaaaaaaaaaaaaaaaaaaaaaaaaaaaaaaaaaaaaaaaaaaaaaaaaaaaaaaaaa

SEQ ID NO: 846 - RNA, 1295 nt, Artificial Sequence; identical to SEQ ID NO: 845
  mRNA product Design a-1 (A100) comprising derived and/or modified sequence from RVA/Wa/P[8]__AAA66953.1__LumSynt_P2_VP8*(65-223) (opt5)

SEQ ID NO: 847 - RNA, 1367 nt, Artificial Sequence
  mRNA product Design a-1 (A100) comprising derived and/or modified sequence from RVA/BE1058/P[4]__AEX30665.1__LumSynt_P2_VP8*(41-223) (opt5)
aggagagucccgcagucggcguccagcggcucugcuuguucgugugugugucguugcaggccuuauucaagcuuaccaugcagaucuacgagggcaagcugaccgccgaagggcucagauucggaauuguggcuagccgguuuaaccacgcccuggucgaccgccuuguugagggcgcgaucgaugcuauugugagacaugggggacgggaagaggacaucacacuggugcgcguccccggcuccugggaaauuccuguggccgccggggagcucgcuagaaaagaggauaucgacgccguuaucgcuauuggagugcugauccggggcgccacgccgcacuucgauuauauugcgucugaagucagcaagggccuugccgaccugucccucgagcugcgcaaacccaucaccuuuggggugauuacagcugauacccuggaacaagccaucgagagagcuggaacaaagcauggcaauaaagggugggaggccgcgcucucugccauugaaauggcuaaccuguucaagagccuucggggaggcuccgggggaucuggcggcagcgggggauccggcgggggacaguacaucaaggccaauagcaaauuuaucggcauuaccgagcuggggucuggauccggcgcucagacacgcuaugccccuguuaacuggggccacggggaaaucaaugacagcaccacgguggagcccguccucgauggaccuuaccagcccaccacauucaagccuccgaacgacuauuggcugcuuauuucuuccaauaccgauggcgugguguacgaaagcacaaacaauucugacuuuuggaccgccgucaucgcuguugagccccaugugaaccaaacgaauagacaguaugugcuguucggggagaacaaacaguuuaauauugaaaacuccagcgauaaguggaaauucuuugagauguucaagggaaauucccagucugacuuuagcaaccggcgcacacucaccuccagcaacagacuggucggcaugcugaaguacgggggccggguguggacauuccacggagaaaccccucgcgcgaccacagacucuuccagcacggccgaucucaauaacaucucuaucauuauccacagcgaguucuacauuauccccagaucccaagaaucuaaaugcaaugaguauauuaacaauggccugugaggacuagucccuguucccagagcccacuuuuuuuucuuuuuuugaaauaaaauagccugucuuucagaucuaaaaaaaaaaaaaaaaaaaaaaaaaaaaaaaaaaaaaaaaaaaaaaaaaaaaaaaaaaaaaaaaaaaaaaaaaaaaaaaaaaaaaaaaaaaaaaaaaaaa

SEQ ID NO: 848 - RNA, 1367 nt, Artificial Sequence
  mRNA product Design a-1 (A100) comprising derived and/or modified sequence from RVA/DS-1/P[4]__CAD62680.1__LumSynt_P2_VP8*(41-223) (opt5)
aggagagucccgcagucggcguccagcggcucugcuuguucgugugugugucguugcaggccuuauucaagcuuaccaugcagaucuacgagggcaagcugaccgccgaagggcucagauucggaauuguggcuagccgguuuaaccacgcccuggucgaccgccuuguugagggcgcgaucgaugcuauugugagacaugggggacgggaagaggacaucacacuggugcgcguccccggcuccugggaaauuccuguggccgccggggagcucgcuagaaaagaggauaucgacgccguuaucgcuauuggagugcugauccggggcgccacgccgcacuucgauuauauugcgucugaagucagcaagggccuugccgaccugucccucgagcugcgcaaacccaucaccuuuggggugauuacagcugauacccuggaacaagccaucgagagagcuggaacaaagcauggcaauaaagggugggaggccgcgcucucugccauugaaauggcuaaccuguucaagagccuucggggaggcuccgggggaucuggcggcagcgggggauccggcgggggacaguacaucaaggccaauagcaaauuuaucggcauuaccgagcuggggucuggauccggcgcucagacacgcuaugccccuguuaacuggggcagcugggaaaucaaugacucuaccacgguggagcccguccucgaugggccuuaccagcccaccacauucaagccuccgaacgacuauuggcugcuuauuuccagcaauaccaacggagugguguacgaaucuacaaauaacaaugauuuuuggaccgccgucuccagcguugagccccacgugucccaaacgaacagacaguauauccuguucggcgagaauaaacaguuuaacguggaaaauaacucugacaaguggaaauucuuugagacauucaccgggagcucccagggaaacuuuagcaaucggcgcacacucaccucuuccaacagacuggucggcaugcugaaguacgggggccggguguggaccuuccauggagaaacaccucgcgcuacgaccgauagcucuaauacagcggaccucaacaauauuagcaucaucauucacuccgaguucuacaucauucccagaucucaagaaagcaagugcaacgaguauaucaauaacggccugugaggacuagucccuguucccagagcccacuuuuuuuucuuuuuuugaaauaaaauagccugucuuucagaucuaaaaaaaaaaaaaaaaaaaaaaaaaaaaaaaaaaaaaaaaaaaaaaaaaaaaaaaaaaaaaaaaaaaaaaaaaaaaaaaaaaaaaaaaaaaaaaaaaaaa

SEQ ID NO: 849 - RNA, 1367 nt, Artificial Sequence; identical to SEQ ID NO: 848
  mRNA product Design a-1 (A100) comprising derived and/or modified sequence from RVA/DS-1/P[4]__ABV53252.1__LumSynt_P2_VP8*(41-223) (opt5)

SEQ ID NO: 850 - RNA, 1367 nt, Artificial Sequence
  mRNA product Design a-1 (A100) comprising derived and/or modified sequence from RVA/F01322/P[6]__AFA51886.1__LumSynt_P2_VP8*(41-223) (opt5)
aggagagucccgcagucggcguccagcggcucugcuuguucgugugugugucguugcaggccuuauucaagcuuaccaugcagaucuacgagggcaagcugaccgccgaagggcucagauucggaauuguggcuagccgguuuaaccacgcccuggucgaccgccuuguugagggcgcgaucgaugcuauugugagacaugggggacgggaagaggacaucacacuggugcgcguccccggcuccugggaaauuccuguggccgccggggagcucgcuagaaaagaggauaucgacgccguuaucgcuauuggagugcugauccggggcgccacgccgcacuucgauuauauugcgucugaagucagcaagggccuugccgaccugucccucgagcugcgcaaacccaucaccuuuggggugauuacagcugauacccuggaacaagccaucgagagagcuggaacaaagcauggcaauaaagggugggaggccgcgcucucugccauugaaauggcuaaccuguucaagagccuucggggaggcuccgggggaucuggcggcagcgggggauccggcgggggacaguacaucaaggccaauagcaaauuuaucggcauuaccgagcuggggucuggauccggcgcucagacaaacuaugccccuguuaccuggagccacggcgaagugaaugacucuacgaccaucgagcccguccucgaugggccuuaccagcccacaaacuucaagccuccgaaugacuauuggauucugcuuaaccccaccaaucaacagguggugcuggaaggaacaaacaaaaccgauaucugggucgcccuccugcugguugagccuaaugugacgaaccagucccgccaguacacacucuuuggcgagaccaagcaaauuacaguggaaaauaacaccaauaaauggaaguucuuugagauguucagaagcucugucuccgcugaauuucagcauaagcggacccugacaagcgacacgaaacuugcgggguucaugaaguuuuauaacuccguguggaccuuccacggagagacacccaacgccaccacagauuacucuagcaccuccaaucuguucgaaguugagacggugauccacgucgaguuuuacaucauuccucgcagccaggaaucuaaaugcuccgaguauaucaacacaggccucugaggacuagucccuguucccagagcccacuuuuuuuucuuuuuuugaaauaaaauagccugucuuucagaucuaaaaaaaaaaaaaaaaaaaaaaaaaaaaaaaaaaaaaaaaaaaaaaaaaaaaaaaaaaaaaaaaaaaaaaaaaaaaaaaaaaaaaaaaaaaaaaaaaaaa

SEQ ID NO: 851 - RNA, 1367 nt, Artificial Sequence
  mRNA product Design a-1 (A100) comprising derived and/or modified sequence from RVA/1076/P[6]__AAA47337.1__LumSynt_P2_VP8*(41-223) (opt5)
aggagagucccgcagucggcguccagcggcucugcuuguucgugugugugucguugcaggccuuauucaagcuuaccaugcagaucuacgagggcaagcugaccgccgaagggcucagauucggaauuguggcuagccgguuuaaccacgcccuggucgaccgccuuguugagggcgcgaucgaugcuauugugagacaugggggacgggaagaggacaucacacuggugcgcguccccggcuccugggaaauuccuguggccgccggggagcucgcuagaaaagaggauaucgacgccguuaucgcuauuggagugcugauccggggcgccacgccgcacuucgauuauauugcgucugaagucagcaagggccuugccgaccugucccucgagcugcgcaaacccaucaccuuuggggugauuacagcugauacccuggaacaagccaucgagagagcuggaacaaagcauggcaauaaagggugggaggccgcgcucucugccauugaaauggcuaaccuguucaagagccuucggggaggcuccgggggaucuggcggcagcgggggauccggcgggggacaguacaucaaggccaauagcaaauuuaucggcauuaccgagcuggggucuggauccggcgcucagacaaacuaugccccuguuaccuggagccacggcgaagugaaugacucuacgaccaucgagcccguccucgaugggccuuaccagcccacauccuucaagccuccgagcgacuauuggauucugcuuaaccccaccaaucaacagguggugcuggaaggaacaaacaaaaccgauaucugggucgcccuccugcugguugagccuaaugugacgaaccagucucgccaguacacacucuuuggcgagaccaagcaaauuacaguggaaaauaacaccaauaaauggaaguucuuugagauguucagauccagcgucuccgcugaauuucagcauaagcggacccugacaucugacacgaaacuugcgggguuccugaaguuuuauaacagcguguggaccuucuacggagagacaccccacgccaccacagauuacuccagcaccucuaaucucuccgaaguugagacggcuauccacguggaguucuauaucauuccucgcagccaggaaucuaaaugcaacgaguacaucaacacaggccugugaggacuagucccuguucccagagcccacuuuuuuuucuuuuuuugaaauaaaauagccugucuuucagaucuaaaaaaaaaaaaaaaaaaaaaaaaaaaaaaaaaaaaaaaaaaaaaaaaaaaaaaaaaaaaaaaaaaaaaaaaaaaaaaaaaaaaaaaaaaaaaaaaaaaa

SEQ ID NO: 852 - RNA, 1367 nt, Artificial Sequence
  mRNA product Design a-1 (A100) comprising derived and/or modified sequence from RVA/BE1128/P[8]__AEX30671.1__LumSynt_P2_VP8*(41-223) (opt5)
aggagagucccgcagucggcguccagcggcucugcuuguucgugugugugucguugcaggccuuauucaagcuuaccaugcagaucuacgagggcaagcugaccgccgaagggcucagauucggaauuguggcuagccgguuuaaccacgcccuggucgaccgccuuguugagggcgcgaucgaugcuauugugagacaugggggacgggaagaggacaucacacuggugcgcguccccggcuccugggaaauuccuguggccgccggggagcucgcuagaaaagaggauaucgacgccguuaucgcuauuggagugcugauccggggcgccacgccgcacuucgauuauauugcgucugaagucagcaagggccuugccgaccugucccucgagcugcgcaaacccaucaccuuuggggugauuacagcugauacccuggaacaagccaucgagagagcuggaacaaagcauggcaauaaagggugggaggccgcgcucucugccauugaaauggcuaaccuguucaagagccuucggggaggcuccgggggaucuggcggcagcgggggauccggcgggggacaguacaucaaggccaauagcaaauuuaucggcauuaccgagcuggggucuggauccggcgcucagacacgcuaugccccuguuaacuggggccacggggaaaucaaugacagcaccacgguggagcccauucucgauggaccuuaccagcccaccacauucaccccuccgacagacuauuggauccugauuaccucuaacacgaauggcgucguguacgaauccacaaacaauagcgauuuuuggaccgccgugaucgcugucgagccccauguuaacccuguggacagacaauauaauguguucggggagaacaagcaguuuaauguccggaacgauucugacaaauggaaguuccuugaaauguuucgcggauccagccagaaugacuucuacaacagacggacacugaccuccgauacccgccucgugggcauccugaaauacgggggcagaguuuggacauuucacggagagacgccccgggcgaccacagacucuagcaacaccgccaaucuggauggcauuuccaucacaauucacagcgaguucuauaucauuccuagaucucaggaauccaagugcaacgaauacaucaauaacgggcucugaggacuagucccuguucccagagcccacuuuuuuuucuuuuuuugaaauaaaauagccugucuuucagaucuaaaaaaaaaaaaaaaaaaaaaaaaaaaaaaaaaaaaaaaaaaaaaaaaaaaaaaaaaaaaaaaaaaaaaaaaaaaaaaaaaaaaaaaaaaaaaaaaaaaa

SEQ ID NO: 853 - RNA, 1367 nt, Artificial Sequence
  mRNA product Design a-1 (A100) comprising derived and/or modified sequence from RVA/Wa-VirWa/P[8]__ACR22783.1__LumSynt_P2_VP8*(41-223) (opt5)
aggagagucccgcagucggcguccagcggcucugcuuguucgugugugugucguugcaggccuuauucaagcuuaccaugcagaucuacgagggcaagcugaccgccgaagggcucagauucggaauuguggcuagccgguuuaaccacgcccuggucgaccgccuuguugagggcgcgaucgaugcuauugugagacaugggggacgggaagaggacaucacacuggugcgcguccccggcuccugggaaauuccuguggccgccggggagcucgcuagaaaagaggauaucgacgccguuaucgcuauuggagugcugauccggggcgccacgccgcacuucgauuauauugcgucugaagucagcaagggccuugccgaccugucccucgagcugcgcaaacccaucaccuuuggggugauuacagcugauacccuggaacaagccaucgagagagcuggaacaaagcauggcaauaaagggugggaggccgcgcucucugccauugaaauggcuaaccuguucaagagccuucggggaggcuccgggggaucuggcggcagcgggggauccggcgggggacaguacaucaaggccaauagcaaauuuaucggcauuaccgagcuggggucuggauccggcgcucagacacgcuaugccccuguuaacuggggccacggggaaaucaaugacagcaccacgguggagcccauucucgauggaccuuaccagcccaccacauucaccccuccgaacgacuauuggauccugauuaauucuaacacaaauggcgucguguacgaauccaccaacaauagcgauuuuuggacggccguggucgcuaucgagccccauguuaacccuguggacagacaauauacaaucuucggggagucuaagcaguuuaaugugcggaacgauuccaauaaauggaaguuccuugaaauguuucgcagcuccucucagaacgaguucuacaacagacggacccugacaagcgacacccgccucgucggcauucugaaauacggagggagaguguggaccuuucacggcgaaacaccccgggcgacgaccgacuccagcucuacagccaaucugaacaauaucuccauuaccauccacagcgaguucuauauuaucccuagaucucaggaaagcaagugcaacgaguacaucaauaacggacucugaggacuagucccuguucccagagcccacuuuuuuuucuuuuuuugaaauaaaauagccugucuuucagaucuaaaaaaaaaaaaaaaaaaaaaaaaaaaaaaaaaaaaaaaaaaaaaaaaaaaaaaaaaaaaaaaaaaaaaaaaaaaaaaaaaaaaaaaaaaaaaaaaaaaa

SEQ ID NO: 854 - RNA, 1367 nt, Artificial Sequence
  mRNA product Design a-1 (A100) comprising derived and/or modified sequence from RVA/Wa/P[8]__AAA47290.1__LumSynt_P2_VP8*(41-223) (opt5)
aggagagucccgcagucggcguccagcggcucugcuuguucgugugugugucguugcaggccuuauucaagcuuaccaugcagaucuacgagggcaagcugaccgccgaagggcucagauucggaauuguggcuagccgguuuaaccacgcccuggucgaccgccuuguugagggcgcgaucgaugcuauugugagacaugggggacgggaagaggacaucacacuggugcgcguccccggcuccugggaaauuccuguggccgccggggagcucgcuagaaaagaggauaucgacgccguuaucgcuauuggagugcugauccggggcgccacgccgcacuucgauuauauugcgucugaagucagcaagggccuugccgaccugucccucgagcugcgcaaacccaucaccuuuggggugauuacagcugauacccuggaacaagccaucgagagagcuggaacaaagcauggcaauaaagggugggaggccgcgcucucugccauugaaauggcuaaccuguucaagagccuucggggaggcuccgggggaucuggcggcagcgggggauccggcgggggacaguacaucaaggccaauagcaaauuuaucggcauuaccgagcuggggucuggauccggcgcucagacacgcuaugccccuguuaacuggggccacggggaaaucaaugacagcaccacgguggagcccauucucgauggaccuuaccagcccaccacauucaccccuccgaacgacuauuggauccugauuaauucuaacacaaauggcgucguguacgaauccaccaacaauagcgauuuuuggacggccguggucgcuaucgagccccauguuaacccuguggacagacaauauacaaucuucggggagucuaagcaguuuaauguguccaacgauagcaauaaauggaaguuccuugaaauguuucgguccucuagccagaacgaguucuacaaccgcagaacccugacauccgacacccgguuugucggcauucucaaauacggagggcgcguguggaccuuccacggcgaaacacccagagcgacgaccgacucuagcuccacagccaaucugaacaauaucagcauuaccauccacucugaguucuauauuaucccucggagccaggaauccaagugcaacgaguacaucaauaacggacugugaggacuagucccuguucccagagcccacuuuuuuuucuuuuuuugaaauaaaauagccugucuuucagaucuaaaaaaaaaaaaaaaaaaaaaaaaaaaaaaaaaaaaaaaaaaaaaaaaaaaaaaaaaaaaaaaaaaaaaaaaaaaaaaaaaaaaaaaaaaaaaaaaaaaa

SEQ ID NO: 855 - RNA, 1367 nt, Artificial Sequence
  mRNA product Design a-1 (A100) comprising derived and/or modified sequence from RVA/Wa/P[8]__AAA66953.1__LumSynt_P2_VP8*(41-223) (opt5)
aggagagucccgcagucggcguccagcggcucugcuuguucgugugugugucguugcaggccuuauucaagcuuaccaugcagaucuacgagggcaagcugaccgccgaagggcucagauucggaauuguggcuagccgguuuaaccacgcccuggucgaccgccuuguugagggcgcgaucgaugcuauugugagacaugggggacgggaagaggacaucacacuggugcgcguccccggcuccugggaaauuccuguggccgccggggagcucgcuagaaaagaggauaucgacgccguuaucgcuauuggagugcugauccggggcgccacgccgcacuucgauuauauugcgucugaagucagcaagggccuugccgaccugucccucgagcugcgcaaacccaucaccuuuggggugauuacagcugauacccuggaacaagccaucgagagagcuggaacaaagcauggcaauaaagggugggaggccgcgcucucugccauugaaauggcuaaccuguucaagagccuucggggaggcuccgggggaucuggcggcagcgggggauccggcgggggacaguacaucaaggccaauagcaaauuuaucggcauuaccgagcuggggucuggauccggcgcucagacacgcuaugccccuguuaacuggggccacggggaaaucaaugacagcaccacgguggagcccaugcucgauggaccuuaccagcccaccacauucaccccuccgaacgacuauuggauucugaucaauucuaacacaaauggcgucguguacgaauccaccaacaauagcgauuuuuggacggccguggucgcuauugagccccauguuaacccuguggacagacaauauacaaucuucggggagucuaagcaguuuaauguguccaacgauagcaauaaauggaaguuccuugaaauguuucgguccucuagccagaacgaguucuacaaccgcagaacccugacauccgacacccgguuugucggaauccucaaauacggcgggcgcguguggaccuuccacggcgaaacacccagagcgacgaccgacucuagcuccacagccaaucugaacaauauuagcaucaccauucacucugaguucuauaucauuccucggagccaggaauccaagugcaacgaguacaucaauaacggacugugaggacuagucccuguucccagagcccacuuuuuuuucuuuuuuugaaauaaaauagccugucuuucagaucuaaaaaaaaaaaaaaaaaaaaaaaaaaaaaaaaaaaaaaaaaaaaaaaaaaaaaaaaaaaaaaaaaaaaaaaaaaaaaaaaaaaaaaaaaaaaaaaaaaaa

SEQ ID NO: 856 - RNA, 842 nt, Artificial Sequence
  mRNA product Design a-1 (A100) comprising derived and/or modified sequence from RVA/BE1058/P[4]__AEX30665.1__SP-IgE_P2_VP8*(65-223) (opt5)
aggagagucccgcagucggcguccagcggcucugcuuguucgugugugugucguugcaggccuuauucaagcuuaccauggacuggaccuggauccuguuccucguggccgcugccacaagaguccacagccaguacauuaaggcgaacuccaaauuuaucggcauuacggagcuggggucuggaagcggccuugaugggcccuaucaaccuaccacauucaagccgcccaaugacuacuggcugcucaucuccucuaacaccgauggaguuguguaugaaagcacaaauaacuccgacuuuuggaccgcugugauugccgucgagccucaugugaaucagacaaaccggcaguacguucuguucggcgaaaauaaacaguuuaacaucgaaaauucuagcgauaaguggaaauucuuugagauguucaaggggaacucccaaagcgacuuuucuaaucgcagaacccuuacguccagcaaccggcuggugggaaugcucaaguauggcggccgcgucuggaccuuccacggggagacacccagagccaccacagauucuuccagcaccgcugaccugaauaacaucucuauuaucauucauuccgaguuuuacaucauuccucggagccaggaauccaaaugcaaugaguauaucaacaacggacugugaggacuagucccuguucccagagcccacuuuuuuuucuuuuuuugaaauaaaauagccugucuuucagaucuaaaaaaaaaaaaaaaaaaaaaaaaaaaaaaaaaaaaaaaaaaaaaaaaaaaaaaaaaaaaaaaaaaaaaaaaaaaaaaaaaaaaaaaaaaaaaaaaaaaa

SEQ ID NO: 857 - RNA, 842 nt, Artificial Sequence
  mRNA product Design a-1 (A100) comprising derived and/or modified sequence from RVA/DS-1/P[4]__CAD62680.1__SP-IgE_P2_VP8*(65-223) (opt5)
aggagagucccgcagucggcguccagcggcucugcuuguucgugugugugucguugcaggccuuauucaagcuuaccauggacuggaccuggauccuguuccucguggccgcugccacaagaguccacagccaguacauuaaggcgaacuccaaauuuaucggcauuacggagcuggggucuggaagcggccuugaugggcccuaucaaccuaccacauucaagccgcccaaugacuacuggcugcucaucuccucuaacaccaauggaguuguguaugaaagcacaaacaauaacgauuuuuggaccgcuguguccucugucgagccucaugugagccagacaaaucggcaguacauucuguucggcgaaaacaaacaguuuaauguugagaacaauuccgacaaguggaaauucuuugaaaccuucacggggagcucucaaggaaacuuuuccaaucgcagaacccuuacaagcucuaaccggcuggugggcaugcucaaguauggcgggcgcgucuggaccuuccacggagagacacccagagccaccacggauuccagcaauacagccgaccugaacaacaucucuaucauuauccauuccgaguuuuacauuaucccucggagccaggaauccaagugcaaugaguauauuaacaauggccugugaggacuagucccuguucccagagcccacuuuuuuuucuuuuuuugaaauaaaauagccugucuuucagaucuaaaaaaaaaaaaaaaaaaaaaaaaaaaaaaaaaaaaaaaaaaaaaaaaaaaaaaaaaaaaaaaaaaaaaaaaaaaaaaaaaaaaaaaaaaaaaaaaaaaa

SEQ ID NO: 858 - RNA, 842 nt, Artificial Sequence; identical to SEQ ID NO: 857
  mRNA product Design a-1 (A100) comprising derived and/or modified sequence from RVA/DS-1/P[4]__ABV53252.1__SP-IgE_P2_VP8*(65-223) (opt5)

SEQ ID NO: 859 - RNA, 842 nt, Artificial Sequence
  mRNA product Design a-1 (A100) comprising derived and/or modified sequence from RVA/F01322/P[6]__AFA51886.1__SP-IgE_P2_VP8*(65-223) (opt5)
aggagagucccgcagucggcguccagcggcucugcuuguucgugugugugucguugcaggccuuauucaagcuuaccauggacuggaccuggauccuguuccucguggccgcugccacaagaguccacagccaguacauuaaggcgaacuccaaauuuaucggcauuacggagcuggggucuggaagcggccuugaugggcccuaucaaccuaccaauuucaagccgcccaacgacuacuggauccugcucaauccuacaaaccagcagguugugcuggaaggaaccaauaaaacagauauuuggguggcccuucugcucgucgagcccaacgugaccaaucagucccggcaauauacacuguuuggcgaaaccaagcagaucacgguugagaacaauaccaacaaauggaaguucuuugaaauguuccgcucuagcguguccgcugaguuucagcauaagagaacacugaccucugacacaaaacucgccggguucaugaaguuuuacaauagcgucuggaccuuccacggagagacgccuaacgcuacaaccgauuauuccagcacaucuaaucuguuugaaguggagaccguuauccauguggaguucuacauuaucccccggucccaggaaagcaaaugcucugaguauauuaacaccggccuuugaggacuagucccuguucccagagcccacuuuuuuuucuuuuuuugaaauaaaauagccugucuuucagaucuaaaaaaaaaaaaaaaaaaaaaaaaaaaaaaaaaaaaaaaaaaaaaaaaaaaaaaaaaaaaaaaaaaaaaaaaaaaaaaaaaaaaaaaaaaaaaaaaaaaa

SEQ ID NO: 860 - RNA, 842 nt, Artificial Sequence
  mRNA product Design a-1 (A100) comprising derived and/or modified sequence from RVA/1076/P[6]__AAA47337.1__SP-IgE_P2_VP8*(65-223) (opt5)
aggagagucccgcagucggcguccagcggcucugcuuguucgugugugugucguugcaggccuuauucaagcuuaccauggacuggaccuggauccuguuccucguggccgcugccacaagaguccacagccaguacauuaaggcgaacuccaaauuuaucggcauuacggagcuggggucuggaagcggccuugaugggcccuaucaaccuaccuccuucaagccgcccucugacuacuggauccugcucaauccuacaaaccagcagguugugcuggaaggaaccaauaaaacagauauuuggguggcccuucugcucgucgagcccaacgugaccaaucagagccggcaauauacacuguuuggcgaaaccaagcagaucacgguugagaacaauaccaacaaauggaaguucuuugaaauguuccgcuccucugugagcgcugaguuucagcauaagagaacacugaccuccgacacaaaacucgccggguuccugaaguuuuacaauagcgucuggaccuucuauggagagacgccucacgcuacaaccgauuacucuuccacaagcaaccuuucugaaguggagaccgccauccauguugaauuuuauauuaucccccggucccaggagagcaaaugcaaugaguacauuaacaccggccugugaggacuagucccuguucccagagcccacuuuuuuuucuuuuuuugaaauaaaauagccugucuuucagaucuaaaaaaaaaaaaaaaaaaaaaaaaaaaaaaaaaaaaaaaaaaaaaaaaaaaaaaaaaaaaaaaaaaaaaaaaaaaaaaaaaaaaaaaaaaaaaaaaaaaa

SEQ ID NO: 861 - RNA, 842 nt, Artificial Sequence
  mRNA product Design a-1 (A100) comprising derived and/or modified sequence from RVA/BE1128/P[8]__AEX30671.1__SP-IgE_P2_VP8*(65-223) (opt5)
aggagagucccgcagucggcguccagcggcucugcuuguucgugugugugucguugcaggccuuauucaagcuuaccauggacuggaccuggauccuguuccucguggccgcugccacaagaguccacagccaguacauuaaggcgaacuccaaauuuaucggcauuacggagcuggggucuggaagcggccuugaugggcccuaucaaccuaccacauucaccccgcccacagacuacuggauccugauuaccuccaauacaaacggaguuguguaugaaucuaccaauaacagcgauuuuuggacggcugugaucgccgucgagccucaugugaaucccguugaccggcaguacaacguguucggcgaaaauaagcaguuuaacguccgcaaugauuccgacaaauggaaguuccucgagauguuuagagggucuagccagaacgauuucuauaaucggcgcacccugacauccgacaccagacuugugggaauccugaaauacggcggccggguuuggacauuucacggggaaaccccucgcgccacgacagauagcucuaacaccgcuaaucucgacggaauuuccaucacaauucauagcgaguucuauaucauucccagaucucaagaguccaagugcaacgaauacaucaauaacggccugugaggacuagucccuguucccagagcccacuuuuuuuucuuuuuuugaaauaaaauagccugucuuucagaucuaaaaaaaaaaaaaaaaaaaaaaaaaaaaaaaaaaaaaaaaaaaaaaaaaaaaaaaaaaaaaaaaaaaaaaaaaaaaaaaaaaaaaaaaaaaaaaaaaaaa

SEQ ID NO: 862 - RNA, 842 nt, Artificial Sequence
  mRNA product Design a-1 (A100) comprising derived and/or modified sequence from RVA/Wa-VirWa/P[8]__ACR22783.1__SP-IgE_P2_VP8*(65-223) (opt5)
aggagagucccgcagucggcguccagcggcucugcuuguucgugugugugucguugcaggccuuauucaagcuuaccauggacuggaccuggauccuguuccucguggccgcugccacaagaguccacagccaguacauuaaggcgaacuccaaauuuaucggcauuacggagcuggggucuggaagcggccuugaugggcccuaucaaccuaccacauucaccccgcccaaugacuacuggauccugauuaacuccaauacaaacggaguuguguaugaaucuaccaauaacagcgauuuuuggacagcuguggucgccaucgagccucaugugaaucccguugaccggcaguacaccaucuucggcgaauccaagcaguuuaacgugcgcaaugauucuaacaaauggaaguuccucgagauguuuagaagcuccagccagaaugaguucuauaaccggcgcacgcugaccucugacacaagacuugucgggauucugaaauacggaggccggguguggaccuuucacggcgaaacaccucgcgccaccacggauuccagcucuacagcuaaucucaacaauaucuccauuaccauccauagcgaguucuauauuauccccagaucucaagaauccaagugcaacgaguacauuaacaaugggcugugaggacuagucccuguucccagagcccacuuuuuuuucuuuuuuugaaauaaaauagccugucuuucagaucuaaaaaaaaaaaaaaaaaaaaaaaaaaaaaaaaaaaaaaaaaaaaaaaaaaaaaaaaaaaaaaaaaaaaaaaaaaaaaaaaaaaaaaaaaaaaaaaaaaaa

SEQ ID NO: 863 - RNA, 842 nt, Artificial Sequence
  mRNA product Design a-1 (A100) comprising derived and/or modified sequence from RVA/Wa/P[8]__AAA47290.1__SP-IgE_P2_VP8*(65-223) (opt5)
aggagagucccgcagucggcguccagcggcucugcuuguucgugugugugucguugcaggccuuauucaagcuuaccauggacuggaccuggauccuguuccucguggccgcugccacaagaguccacagccaguacauuaaggcgaacuccaaauuuaucggcauuacggagcuggggucuggaagcggccuugaugggcccuaucaaccuaccacauucaccccgcccaaugacuacuggauccugauuaacuccaauacaaacggaguuguguaugaaucuaccaauaacagcgauuuuuggacagcuguggucgccaucgagccucaugugaaucccguugaccggcaguacaccaucuucggcgaauccaagcaguuuaacgugucuaaugauagcaacaaauggaaguuccucgagauguuucgcuccagcucucagaaugaguucuauaacagacggacgcugaccuccgacacacgcuuugucgggauucuuaaauacggaggcagaguguggaccuuccacggcgaaacaccucgggccaccacggauucuagcuccacagcuaaucugaacaauaucagcauuaccauccauucugaguuuuauauuaucccccgcucccaagaaagcaagugcaacgaguacauuaacaaugggcucugaggacuagucccuguucccagagcccacuuuuuuuucuuuuuuugaaauaaaauagccugucuuucagaucuaaaaaaaaaaaaaaaaaaaaaaaaaaaaaaaaaaaaaaaaaaaaaaaaaaaaaaaaaaaaaaaaaaaaaaaaaaaaaaaaaaaaaaaaaaaaaaaaaaaa

SEQ ID NO: 864 - RNA, 842 nt, Artificial Sequence; identical to SEQ ID NO: 863
  mRNA product Design a-1 (A100) comprising derived and/or modified sequence from RVA/Wa/P[8]__AAA66953.1__SP-IgE_P2_VP8*(65-223) (opt5)

SEQ ID NO: 865 - RNA, 914 nt, Artificial Sequence
  mRNA product Design a-1 (A100) comprising derived and/or modified sequence from RVA/BE1058/P[4]__AEX30665.1__SP-IgE_P2_VP8*(41-223) (opt5)
aggagagucccgcagucggcguccagcggcucugcuuguucgugugugugucguugcaggccuuauucaagcuuaccauggacuggaccuggauccuguuccucguggccgcugccacaagaguccacagccaguacauuaaggcgaacuccaaauuuaucggcauuacggagcuggggucuggaagcggcgcucaaacccgguaugcccccguuaauugggggcauggagaaaucaacgauuccacaaccguggagccugugcuugacggcccguaccagcccacaaccuucaagccucccaaugauuauuggcugcucauuucuagcaacacagacggggucguguacgaauccaccaauaacucugauuuuuggacggccguuaucgcuguggagccucacgucaaucagaccaaccgccaguaugugcuguucggagaaaauaaacaauuuaacaucgagaauagcuccgacaaguggaaauucuuugagauguucaagggcaacagccagucugauuuuuccaauagacggacacuuaccagcucuaaccgccugguuggcaugcucaaguacgggggaagaguguggacauuccauggcgaaacgccccgggccaccacagacuccagcucuaccgcugaucugaauaacauuuccaucauuauccacagcgaguuuuauauuaucccucgcucccaggaaucuaaaugcaacgaguacauuaauaacgggcugugaggacuagucccuguucccagagcccacuuuuuuuucuuuuuuugaaauaaaauagccugucuuucagaucuaaaaaaaaaaaaaaaaaaaaaaaaaaaaaaaaaaaaaaaaaaaaaaaaaaaaaaaaaaaaaaaaaaaaaaaaaaaaaaaaaaaaaaaaaaaaaaaaaaaa

SEQ ID NO: 866 - RNA, 914 nt, Artificial Sequence
  mRNA product Design a-1 (A100) comprising derived and/or modified sequence from RVA/DS-1/P[4]__CAD62680.1__SP-IgE_P2_VP8*(41-223) (opt5)
aggagagucccgcagucggcguccagcggcucugcuuguucgugugugugucguugcaggccuuauucaagcuuaccauggacuggaccuggauccuguuccucguggccgcugccacaagaguccacagccaguacauuaaggcgaacuccaaauuuaucggcauuacggagcuggggucuggaagcggcgcucaaacccgguaugcccccguuaauuggggguccugggaaaucaacgauucuacaaccguggagccugugcuugacggaccguaccagcccacaaccuucaagccucccaaugauuauuggcugcucauuagcuccaacacaaauggcgucguguacgaaucuaccaacaauaacgacuuuuggacggccguuagcuccguggagccucaugucagccagaccaaucgccaguauauccuguucggggaaaacaaacaauuuaauguggagaacaauucugauaaguggaaauucuuugagacauucaccggauccagccagggcaacuuuucuaauagacggacacuuaccuccagcaaccgccugguuggcaugcucaaguacgggggaagaguguggacguuccacggcgaaacaccccgggcuaccacagacucuuccaacaccgccgaucugaauaacaucagcauuaucauucauuccgaguuuuauaucauuccucgcucucaggaaagcaagugcaaugaguacaucaacaaugggcugugaggacuagucccuguucccagagcccacuuuuuuuucuuuuuuugaaauaaaauagccugucuuucagaucuaaaaaaaaaaaaaaaaaaaaaaaaaaaaaaaaaaaaaaaaaaaaaaaaaaaaaaaaaaaaaaaaaaaaaaaaaaaaaaaaaaaaaaaaaaaaaaaaaaaa

SEQ ID NO: 867 - RNA, 914 nt, Artificial Sequence; identical to SEQ ID NO: 866
  mRNA product Design a-1 (A100) comprising derived and/or modified sequence from RVA/DS-1/P[4]__ABV53252.1__SP-IgE_P2_VP8*(41-223) (opt5)

SEQ ID NO: 868 - RNA, 914 nt, Artificial Sequence
  mRNA product Design a-1 (A100) comprising derived and/or modified sequence from RVA/F01322/P[6]__AFA51886.1__SP-IgE_P2_VP8*(41-223) (opt5)
aggagagucccgcagucggcguccagcggcucugcuuguucgugugugugucguugcaggccuuauucaagcuuaccauggacuggaccuggauccuguuccucguggccgcugccacaagaguccacagccaguacauuaaggcgaacuccaaauuuaucggcauuacggagcuggggucuggaagcggcgcucaaaccaauuaugcccccguuacauggucccauggggaagugaacgauucuaccacaaucgagccugugcuugacggaccguaccagcccaccaauuucaagccucccaacgauuauuggauucugcucaauccuacaaaccagcaggucgugcuggaaggcaccaauaaaacggacaucuggguugcccuucugcucguggagcccaacgucaccaaucaaagccggcaguacacacuguuuggggaaaccaagcagaucacaguggagaacaauaccaacaaauggaaguucuuugagauguuccgcuccucuguuagcgcugaauuucagcacaagagaacgcugacauccgauaccaaacucgccggauucaugaaguuuuauaauagcguguggacauuccauggcgagaccccuaacgcuaccacagacuacucuuccacgagcaaucuguuugaagucgagaccgugauucacguggaguucuauaucauuccgcggucucaagaauccaaaugcagcgaguacaucaacacaggccuuugaggacuagucccuguucccagagcccacuuuuuuuucuuuuuuugaaauaaaauagccugucuuucagaucuaaaaaaaaaaaaaaaaaaaaaaaaaaaaaaaaaaaaaaaaaaaaaaaaaaaaaaaaaaaaaaaaaaaaaaaaaaaaaaaaaaaaaaaaaaaaaaaaaaaa

SEQ ID NO: 869 - RNA, 914 nt, Artificial Sequence
  mRNA product Design a-1 (A100) comprising derived and/or modified sequence from RVA/1076/P[6]__AAA47337.1__SP-IgE_P2_VP8*(41-223) (opt5)
aggagagucccgcagucggcguccagcggcucugcuuguucgugugugugucguugcaggccuuauucaagcuuaccauggacuggaccuggauccuguuccucguggccgcugccacaagaguccacagccaguacauuaaggcgaacuccaaauuuaucggcauuacggagcuggggucuggaagcggcgcucaaaccaauuaugcccccguuacauggucccauggggaagugaacgauucuaccacaaucgagccugugcuugacggaccguaccagcccaccagcuucaagccucccuccgauuauuggauucugcucaauccuacaaaccagcaggucgugcuggaaggcaccaauaaaacggacaucuggguugcccuucugcucguggagcccaacgucaccaaucaaucucggcaguacacacuguuuggggaaaccaagcagaucacaguggagaacaauaccaacaaauggaaguucuuugagauguuccgcagcuccguuagcgcugaauuucagcacaagagaacgcugacaucugauaccaaacucgccggauuccugaaguuuuauaauuccguguggacauucuacggcgagaccccucaugcuaccacagacuauagcucuacguccaaccuuagcgaagucgagaccgccauucacguggaguuuuacaucauuccgcggucucaagaauccaaaugcaaugaguacaucaacacaggccugugaggacuagucccuguucccagagcccacuuuuuuuucuuuuuuugaaauaaaauagccugucuuucagaucuaaaaaaaaaaaaaaaaaaaaaaaaaaaaaaaaaaaaaaaaaaaaaaaaaaaaaaaaaaaaaaaaaaaaaaaaaaaaaaaaaaaaaaaaaaaaaaaaaaaa

SEQ ID NO: 870 - RNA, 914 nt, Artificial Sequence
  mRNA product Design a-1 (A100) comprising derived and/or modified sequence from RVA/BE1128/P[8]__AEX30671.1__SP-IgE_P2_VP8*(41-223) (opt5)
aggagagucccgcagucggcguccagcggcucugcuuguucgugugugugucguugcaggccuuauucaagcuuaccauggacuggaccuggauccuguuccucguggccgcugccacaagaguccacagccaguacauuaaggcgaacuccaaauuuaucggcauuacggagcuggggucuggaagcggcgcucaaacccgguaugcccccguuaauugggggcauggagaaaucaacgauuccacaaccguggagccuauucuugacggcccguaccagcccacaaccuucacaccucccaccgauuauuggauccugaucacgucuaauaccaacgggguggucuacgaaagcacaaauaacuccgacuuuuggaccgccgugauugcuguugagccucacgugaaucccgucgaucgccaguauaacguguucggagaaaauaagcaguuuaacguuagaaaugacucugauaaauggaaguuccucgagauguuucggggcagcucccaaaacgacuucuacaaucgcagaacacugaccagcgauacgcggcuugugggcauccugaaauaugggggacgcgucuggacauuucauggcgagaccccuagagccacaaccgacucuuccaacaccgcuaaucucgaugggauuagcaucacaauucacucugaguucuacaucauuccgcggucccaggaaagcaagugcaacgaauacaucaacaauggacugugaggacuagucccuguucccagagcccacuuuuuuuucuuuuuuugaaauaaaauagccugucuuucagaucuaaaaaaaaaaaaaaaaaaaaaaaaaaaaaaaaaaaaaaaaaaaaaaaaaaaaaaaaaaaaaaaaaaaaaaaaaaaaaaaaaaaaaaaaaaaaaaaaaaaa

SEQ ID NO: 871 - RNA, 914 nt, Artificial Sequence
  mRNA product Design a-1 (A100) comprising derived and/or modified sequence from RVA/Wa-VirWa/P[8]__ACR22783.1__SP-IgE_P2_VP8*(41-223) (opt5)
aggagagucccgcagucggcguccagcggcucugcuuguucgugugugugucguugcaggccuuauucaagcuuaccauggacuggaccuggauccuguuccucguggccgcugccacaagaguccacagccaguacauuaaggcgaacuccaaauuuaucggcauuacggagcuggggucuggaagcggcgcucaaacccgguaugcccccguuaauugggggcauggagaaaucaacgauuccacaaccguggagccuauucuugacggcccguaccagcccacaaccuucacaccucccaaugauuauuggauccugaucaacucuaauaccaacgggguggucuacgaaagcacgaauaacuccgacuuuuggaccgccgugguugcuauugagccucacgugaaucccgucgaucgccaguauacaaucuucggagaaucuaagcaguuuaacgugagaaaugacagcaacaaauggaaguuccucgagauguuucgguccagcucucaaaaugaguucuacaaccgcagaacccugacauccgauacccggcuuguuggcauucugaaauauggcgggcgcguguggacguuucauggagaaacaccuagagccaccacagacucuagcuccaccgcuaaucucaacaacaucagcauuaccauccacucugaguucuacauuaucccgcggucccaggaaagcaagugcaaugaguacaucaacaauggccugugaggacuagucccuguucccagagcccacuuuuuuuucuuuuuuugaaauaaaauagccugucuuucagaucuaaaaaaaaaaaaaaaaaaaaaaaaaaaaaaaaaaaaaaaaaaaaaaaaaaaaaaaaaaaaaaaaaaaaaaaaaaaaaaaaaaaaaaaaaaaaaaaaaaaa

SEQ ID NO: 872 - RNA, 914 nt, Artificial Sequence
  mRNA product Design a-1 (A100) comprising derived and/or modified sequence from RVA/Wa/P[8]__AAA47290.1__SP-IgE_P2_VP8*(41-223) (opt5)
aggagagucccgcagucggcguccagcggcucugcuuguucgugugugugucguugcaggccuuauucaagcuuaccauggacuggaccuggauccuguuccucguggccgcugccacaagaguccacagccaguacauuaaggcgaacuccaaauuuaucggcauuacggagcuggggucuggaagcggcgcucaaacccgguaugcccccguuaauugggggcauggagaaaucaacgauuccacaaccguggagccuauucuugacggcccguaccagcccacaaccuucacaccucccaaugauuauuggauccugaucaacucuaauaccaacgggguggucuacgaaagcacgaauaacuccgacuuuuggaccgccgugguugcuauugagccucacgugaaucccgucgaucgccaguauacaaucuucggagaaucuaagcaguuuaacgugagcaaugacuccaacaaauggaaguuccucgagauguuuagaucuagcucccaaaaugaguucuacaaccggcgcacccugacaagcgauaccagauuuguuggcauucuuaaauauggcgggcggguguggacguuccauggagaaacaccucgcgccaccacagacucuuccagcaccgcuaaucugaacaacaucucuauuaccauccacuccgaguuuuacauuaucccgagaagccaggaauccaagugcaaugaguacaucaacaauggccucugaggacuagucccuguucccagagcccacuuuuuuuucuuuuuuugaaauaaaauagccugucuuucagaucuaaaaaaaaaaaaaaaaaaaaaaaaaaaaaaaaaaaaaaaaaaaaaaaaaaaaaaaaaaaaaaaaaaaaaaaaaaaaaaaaaaaaaaaaaaaaaaaaaaaa

SEQ ID NO: 873 - RNA, 914 nt, Artificial Sequence
  mRNA product Design a-1 (A100) comprising derived and/or modified sequence from RVA/Wa/P[8]__AAA66953.1__SP-IgE_P2_VP8*(41-223) (opt5)
aggagagucccgcagucggcguccagcggcucugcuuguucgugugugugucguugcaggccuuauucaagcuuaccauggacuggaccuggauccuguuccucguggccgcugccacaagaguccacagccaguacauuaaggcgaacuccaaauuuaucggcauuacggagcuggggucuggaagcggcgcucaaacccgguaugcccccguuaauugggggcauggagaaaucaacgauuccacaaccguggagccuaugcuugacggcccguaccagcccacaaccuucacaccucccaaugauuauuggauucugaucaacucuaauaccaacgggguggucuacgaaagcacgaauaacuccgacuuuuggaccgccgugguugcuaucgagccucacgugaaucccgucgaucgccaguauacaauuuucggagaaucuaagcaguuuaacgugagcaaugacuccaacaaauggaaguuccucgagauguuuagaucuagcucccaaaaugaguucuacaaccggcgcacccugacaagcgauaccagauuuguuggcauccuuaaauauggcgggcggguguggacguuccauggagaaacaccucgcgccaccacagacucuuccagcaccgcuaaucugaacaacauuucuaucaccauucacuccgaguuuuacaucauuccgagaagccaggaauccaagugcaaugaguacaucaacaauggccucugaggacuagucccuguucccagagcccacuuuuuuuucuuuuuuugaaauaaaauagccugucuuucagaucuaaaaaaaaaaaaaaaaaaaaaaaaaaaaaaaaaaaaaaaaaaaaaaaaaaaaaaaaaaaaaaaaaaaaaaaaaaaaaaaaaaaaaaaaaaaaaaaaaaaa

SEQ ID NO: 874 - RNA, 732 nt, Artificial Sequence
  mRNA product Design i-3 (A100) comprising derived and/or modified sequence from RVA/BE1058/P[4]__AEX30665.1__P2_VP8*(65-223) (opt1)
aggagaaagcuuaccaugcaguacaucaaggccaacagcaaguucaucggcaucaccgagcugggcagcggguccggccucgacggccccuaccagcccacgaccuucaagccgcccaacgacuacuggcugcugaucuccagcaacaccgacgggguggucuacgaguccaccaacaacagcgacuucuggacggccgugaucgccguggagccccacgucaaccagaccaaccgccaguacgugcuguucggcgagaacaagcaguucaacaucgagaacuccagcgacaaguggaaguucuucgagauguucaagggcaacucccagagcgacuucuccaaccggcgcacccugaccagcuccaaccggcugguggggaugcucaaguacggcgggcgcgucuggacguuccacggcgagaccccgcgggccaccaccgacagcuccagcacggccgaccugaacaacaucuccaucaucauccacagcgaguucuacaucaucccccgcagccaggaguccaagugcaacgaguacaucaacaacgggcugugaggacuaguuauaagacugacuagcccgaugggccucccaacgggcccuccuccccuccuugcaccgagauuaauaaaaaaaaaaaaaaaaaaaaaaaaaaaaaaaaaaaaaaaaaaaaaaaaaaaaaaaaaaaaaaaaaaaaaaaaaaaaaaaaaaaaaaaaaaaaaaaaaaaa

SEQ ID NO: 875 - RNA, 732 nt, Artificial Sequence
  mRNA product Design i-3 (A100) comprising derived and/or modified sequence from RVA/DS-1/P[4]__CAD62680.1__P2_VP8*(65-223) (opt1)
aggagaaagcuuaccaugcaguacaucaaggccaacagcaaguucaucggcaucaccgagcugggcagcggguccggccucgacgggcccuaccagccgacgaccuucaagccgcccaacgacuacuggcugcugaucuccagcaacaccaacggcguggucuacgaguccaccaacaacaacgacuucuggacggccgugagcuccguggagccccacgucagccagaccaaccgccaguacauccucuucggggagaacaagcaguucaacguggagaacaacuccgacaaguggaaguucuucgagaccuucaccggcagcucccagggcaacuucagcaaccggcgcacgcugaccuccagcaaccggcugguggggaugcucaaguacggcgggcgcgucuggaccuuccacggcgagacgccccgggccaccaccgacuccagcaacaccgccgaccugaacaacaucagcaucaucauccacuccgaguucuacaucaucccccgcagccaggaguccaagugcaacgaguacaucaacaacgggcugugaggacuaguuauaagacugacuagcccgaugggccucccaacgggcccuccuccccuccuugcaccgagauuaauaaaaaaaaaaaaaaaaaaaaaaaaaaaaaaaaaaaaaaaaaaaaaaaaaaaaaaaaaaaaaaaaaaaaaaaaaaaaaaaaaaaaaaaaaaaaaaaaaaaa

SEQ ID NO: 876 - RNA, 732 nt, Artificial Sequence; identical to SEQ ID NO: 875
  mRNA product Design i-3 (A100) comprising derived and/or modified sequence from RVA/DS-1/P[4]__ABV53252.1__P2_VP8*(65-223) (opt1)

SEQ ID NO: 877 - RNA, 732 nt, Artificial Sequence
  mRNA product Design i-3 (A100) comprising derived and/or modified sequence from RVA/F01322/P[6]__AFA51886.1__P2_VP8*(65-223) (opt1)
aggagaaagcuuaccaugcaguacaucaaggccaacagcaaguucaucggcaucaccgagcugggcagcggguccggccucgacgggcccuaccagccgaccaacuucaagccgcccaacgacuacuggauccugcugaaccccaccaaccagcagguggugcucgagggcacgaacaagaccgacaucugggucgcccugcugcucguggagccgaacgugaccaaccagagccggcaguacacccuguucggggagacgaagcagaucaccgucgagaacaacaccaacaaguggaaguucuucgagauguuccgcuccagcguguccgccgaguuccagcacaagcggacccugacgagcgacaccaagcucgccggcuucaugaaguucuacaacuccguguggaccuuccacggcgagacccccaacgccacgaccgacuacagcuccaccagcaaccuguucgaggucgagaccgugauccacguggaguucuacaucaucccccgcucccaggagagcaagugcuccgaguacaucaacacggggcugugaggacuaguuauaagacugacuagcccgaugggccucccaacgggcccuccuccccuccuugcaccgagauuaauaaaaaaaaaaaaaaaaaaaaaaaaaaaaaaaaaaaaaaaaaaaaaaaaaaaaaaaaaaaaaaaaaaaaaaaaaaaaaaaaaaaaaaaaaaaaaaaaaaaa

SEQ ID NO: 878 - RNA, 732 nt, Artificial Sequence
  mRNA product Design i-3 (A100) comprising derived and/or modified sequence from RVA/1076/P[6]__AAA47337.1__P2_VP8*(65-223) (opt1)
aggagaaagcuuaccaugcaguacaucaaggccaacagcaaguucaucggcaucaccgagcugggcagcggguccggccucgacgggcccuaccagccgaccuccuucaagccgcccagcgacuacuggauccugcugaaccccaccaaccagcaggucgugcucgagggcacgaacaagaccgacaucuggguggcccugcugcucguggagcccaacgugaccaaccagucccggcaguacacccuguucggggagacgaagcagaucaccgucgagaacaacaccaacaaguggaaguucuucgagauguuccgcagcuccgugagcgccgaguuccagcacaagcggacccugacguccgacaccaagcucgccggcuuccugaaguucuacaacagcguguggaccuucuacggcgagacgccccacgccaccaccgacuacuccagcaccuccaaccugagcgaggucgagaccgcgauccacguggaguucuacaucaucccccgcucccaggagagcaagugcaacgaguacaucaacacggggcugugaggacuaguuauaagacugacuagcccgaugggccucccaacgggcccuccuccccuccuugcaccgagauuaauaaaaaaaaaaaaaaaaaaaaaaaaaaaaaaaaaaaaaaaaaaaaaaaaaaaaaaaaaaaaaaaaaaaaaaaaaaaaaaaaaaaaaaaaaaaaaaaaaaaa

SEQ ID NO: 879 - RNA, 732 nt, Artificial Sequence
  mRNA product Design i-3 (A100) comprising derived and/or modified sequence from RVA/BE1128/P[8]__AEX30671.1__P2_VP8*(65-223) (opt1)
aggagaaagcuuaccaugcaguacaucaaggccaacagcaaguucaucggcaucaccgagcugggcagcggguccggccucgacggcccguaccagccgacgaccuucaccccgcccaccgacuacuggauccugaucacguccaacaccaacggggugguguacgagagcaccaacaacuccgacuucuggaccgccgucaucgccguggagccccacgugaacccggucgaccgccaguacaacguguucggcgagaacaagcaguucaacgugcggaacgacagcgacaaguggaaguuccuggagauguuccgcggcuccagccagaacgacuucuacaaccggcgcacgcucaccuccgacacccggcuggucgggauccugaaguacggcgggcgcguguggaccuuccacggcgagacgccccgggccaccaccgacagcuccaacaccgccaaccucgacgggaucagcaucacgauccacuccgaguucuacaucaucccccgcagccaggaguccaagugcaacgaguacaucaacaacggccugugaggacuaguuauaagacugacuagcccgaugggccucccaacgggcccuccuccccuccuugcaccgagauuaauaaaaaaaaaaaaaaaaaaaaaaaaaaaaaaaaaaaaaaaaaaaaaaaaaaaaaaaaaaaaaaaaaaaaaaaaaaaaaaaaaaaaaaaaaaaaaaaaaaaa

SEQ ID NO: 880 - RNA, 732 nt, Artificial Sequence
  mRNA product Design i-3 (A100) comprising derived and/or modified sequence from RVA/Wa-VirWa/P[8]__ACR22783.1__P2_VP8*(65-223) (opt1)
aggagaaagcuuaccaugcaguacaucaaggccaacagcaaguucaucggcaucaccgagcugggcagcggguccggccucgacgggcccuaccagccgacgaccuucaccccgcccaacgacuacuggauccugaucaacagcaacaccaacggcgucguguacgaguccacgaacaacagcgacuucuggaccgccguggucgccaucgagccccacgugaacccgguggaccgccaguacaccaucuucggggaguccaagcaguucaacguccggaacgacagcaacaaguggaaguuccuggagauguuccgcuccagcucccagaacgaguucuacaaccggcgcacccucacgagcgacacccggcuggugggcauccugaaguacggcgggcgcguguggaccuuccacggcgagaccccgcgggccacgaccgacuccagcuccaccgccaaccucaacaacaucagcaucaccauccacuccgaguucuacaucaucccccgcagccaggagagcaagugcaacgaguacaucaacaacgggcugugaggacuaguuauaagacugacuagcccgaugggccucccaacgggcccuccuccccuccuugcaccgagauuaauaaaaaaaaaaaaaaaaaaaaaaaaaaaaaaaaaaaaaaaaaaaaaaaaaaaaaaaaaaaaaaaaaaaaaaaaaaaaaaaaaaaaaaaaaaaaaaaaaaaa

SEQ ID NO: 881 - RNA, 732 nt, Artificial Sequence
  mRNA product Design i-3 (A100) comprising derived and/or modified sequence from RVA/Wa/P[8]__AAA47290.1__P2_VP8*(65-223) (opt1)
aggagaaagcuuaccaugcaguacaucaaggccaacagcaaguucaucggcaucaccgagcugggcagcggguccggccucgacgggcccuaccagccgacgaccuucaccccgcccaacgacuacuggauccugaucaacagcaacaccaacggcgucguguacgaguccacgaacaacagcgacuucuggaccgccguggucgccaucgagccccacgugaaccccguggaccgccaguacaccaucuucggggaguccaagcaguucaacgucagcaacgacuccaacaaguggaaguuccuggagauguuccggagcuccagccagaacgaguucuacaaccgccggacccucacguccgacacccgcuucgugggcauccugaaguacggcgggcggguguggaccuuccacggcgagacgccccgcgccaccaccgacagcuccagcaccgccaaccugaacaacaucuccaucaccauccacagcgaguucuacaucaucccccggagccaggaguccaagugcaacgaguacaucaacaacgggcugugaggacuaguuauaagacugacuagcccgaugggccucccaacgggcccuccuccccuccuugcaccgagauuaauaaaaaaaaaaaaaaaaaaaaaaaaaaaaaaaaaaaaaaaaaaaaaaaaaaaaaaaaaaaaaaaaaaaaaaaaaaaaaaaaaaaaaaaaaaaaaaaaaaaa

SEQ ID NO: 882 - RNA, 732 nt, Artificial Sequence; identical to SEQ ID NO: 881
  mRNA product Design i-3 (A100) comprising derived and/or modified sequence from RVA/Wa/P[8]__AAA66953.1__P2_VP8*(65-223) (opt1)

SEQ ID NO: 883 - RNA, 804 nt, Artificial Sequence
  mRNA product Design i-3 (A100) comprising derived and/or modified sequence from RVA/BE1058/P[4]__AEX30665.1__P2_VP8*(41-223) (opt1)
aggagaaagcuuaccaugcaguacaucaaggccaacagcaaguucaucggcaucaccgagcugggcagcggguccggcgcccagacccgguacgcgcccgugaacuggggccacggggagaucaacgacagcaccaccgucgagcccgugcucgacggccccuaccagcccacgaccuucaagccgcccaacgacuacuggcugcugaucuccagcaacaccgacgggguggucuacgaguccaccaacaacagcgacuucuggacggccgugaucgccguggagccccacgucaaccagaccaaccgccaguacgugcuguucggcgagaacaagcaguucaacaucgagaacuccagcgacaaguggaaguucuucgagauguucaagggcaacucccagagcgacuucuccaaccggcgcacccugaccagcuccaaccggcugguggggaugcucaaguacggcgggcgcgucuggacguuccacggcgagaccccgcgggccaccaccgacagcuccagcacggccgaccugaacaacaucuccaucaucauccacagcgaguucuacaucaucccccgcagccaggaguccaagugcaacgaguacaucaacaacgggcugugaggacuaguuauaagacugacuagcccgaugggccucccaacgggcccuccuccccuccuugcaccgagauuaauaaaaaaaaaaaaaaaaaaaaaaaaaaaaaaaaaaaaaaaaaaaaaaaaaaaaaaaaaaaaaaaaaaaaaaaaaaaaaaaaaaaaaaaaaaaaaaaaaaaa

SEQ ID NO: 884 - RNA, 804 nt, Artificial Sequence
  mRNA product Design i-3 (A100) comprising derived and/or modified sequence from RVA/DS-1/P[4]__CAD62680.1__P2_VP8*(41-223) (opt1)
aggagaaagcuuaccaugcaguacaucaaggccaacagcaaguucaucggcaucaccgagcugggcagcggguccggcgcccagacccgguacgcgcccgugaacuggggcuccugggagaucaacgacagcaccaccgucgagcccgugcucgacgggcccuaccagccgacgaccuucaagccgcccaacgacuacuggcugcugaucuccagcaacaccaacggcguggucuacgaguccaccaacaacaacgacuucuggacggccgugagcuccguggagccccacgucagccagaccaaccgccaguacauccucuucggggagaacaagcaguucaacguggagaacaacuccgacaaguggaaguucuucgagaccuucaccggcagcucccagggcaacuucagcaaccggcgcacgcugaccuccagcaaccggcugguggggaugcucaaguacggcgggcgcgucuggaccuuccacggcgagacgccccgggccaccaccgacuccagcaacaccgccgaccugaacaacaucagcaucaucauccacuccgaguucuacaucaucccccgcagccaggaguccaagugcaacgaguacaucaacaacgggcugugaggacuaguuauaagacugacuagcccgaugggccucccaacgggcccuccuccccuccuugcaccgagauuaauaaaaaaaaaaaaaaaaaaaaaaaaaaaaaaaaaaaaaaaaaaaaaaaaaaaaaaaaaaaaaaaaaaaaaaaaaaaaaaaaaaaaaaaaaaaaaaaaaaaa

SEQ ID NO: 885 - RNA, 804 nt, Artificial Sequence; identical to SEQ ID NO: 884
  mRNA product Design i-3 (A100) comprising derived and/or modified sequence from RVA/DS-1/P[4]__ABV53252.1__P2_VP8*(41-223) (opt1)

SEQ ID NO: 886 - RNA, 804 nt, Artificial Sequence
  mRNA product Design i-3 (A100) comprising derived and/or modified sequence from RVA/F01322/P[6]__AFA51886.1__P2_VP8*(41-223) (opt1)
aggagaaagcuuaccaugcaguacaucaaggccaacagcaaguucaucggcaucaccgagcugggcagcggguccggcgcccagaccaacuacgcgcccgugaccuggagccacggcgaggugaacgacuccacgaccaucgagcccguccucgacgggcccuaccagccgaccaacuucaagccgcccaacgacuacuggauccugcugaaccccaccaaccagcagguggugcucgagggcacgaacaagaccgacaucugggucgcccugcugcucguggagccgaacgugaccaaccagagccggcaguacacccuguucggggagacgaagcagaucaccgucgagaacaacaccaacaaguggaaguucuucgagauguuccgcuccagcguguccgccgaguuccagcacaagcggacccugacgagcgacaccaagcucgccggcuucaugaaguucuacaacuccguguggaccuuccacggcgagacccccaacgccacgaccgacuacagcuccaccagcaaccuguucgaggucgagaccgugauccacguggaguucuacaucaucccccgcucccaggagagcaagugcuccgaguacaucaacacggggcugugaggacuaguuauaagacugacuagcccgaugggccucccaacgggcccuccuccccuccuugcaccgagauuaauaaaaaaaaaaaaaaaaaaaaaaaaaaaaaaaaaaaaaaaaaaaaaaaaaaaaaaaaaaaaaaaaaaaaaaaaaaaaaaaaaaaaaaaaaaaaaaaaaaaa

SEQ ID NO: 887 - RNA, 804 nt, Artificial Sequence
  mRNA product Design i-3 (A100) comprising derived and/or modified sequence from RVA/1076/P[6]__AAA47337.1__P2_VP8*(41-223) (opt1)
aggagaaagcuuaccaugcaguacaucaaggccaacagcaaguucaucggcaucaccgagcugggcagcggguccggcgcccagaccaacuacgcgcccgugaccuggagccacggcgaggugaacgacagcacgaccaucgagcccguccucgacgggcccuaccagccgaccuccuucaagccgcccagcgacuacuggauccugcugaaccccaccaaccagcaggucgugcucgagggcacgaacaagaccgacaucuggguggcccugcugcucguggagcccaacgugaccaaccagucccggcaguacacccuguucggggagacgaagcagaucaccgucgagaacaacaccaacaaguggaaguucuucgagauguuccgcagcuccgugagcgccgaguuccagcacaagcggacccugacguccgacaccaagcucgccggcuuccugaaguucuacaacagcguguggaccuucuacggcgagacgccccacgccaccaccgacuacuccagcaccuccaaccugagcgaggucgagaccgcgauccacguggaguucuacaucaucccccgcucccaggagagcaagugcaacgaguacaucaacacggggcugugaggacuaguuauaagacugacuagcccgaugggccucccaacgggcccuccuccccuccuugcaccgagauuaauaaaaaaaaaaaaaaaaaaaaaaaaaaaaaaaaaaaaaaaaaaaaaaaaaaaaaaaaaaaaaaaaaaaaaaaaaaaaaaaaaaaaaaaaaaaaaaaaaaaa

SEQ ID NO: 888 - RNA, 804 nt, Artificial Sequence
  mRNA product Design i-3 (A100) comprising derived and/or modified sequence from RVA/BE1128/P[8]__AEX30671.1__P2_VP8*(41-223) (opt1)
aggagaaagcuuaccaugcaguacaucaaggccaacagcaaguucaucggcaucaccgagcugggcagcggguccggcgcccagacccgguacgcgcccgugaacuggggccacggggagaucaacgacagcaccaccgucgagcccauccucgacggcccguaccagccgacgaccuucaccccgcccaccgacuacuggauccugaucacguccaacaccaacggggugguguacgagagcaccaacaacuccgacuucuggaccgccgucaucgccguggagccccacgugaacccggucgaccgccaguacaacguguucggcgagaacaagcaguucaacgugcggaacgacagcgacaaguggaaguuccuggagauguuccgcggcuccagccagaacgacuucuacaaccggcgcacgcucaccuccgacacccggcuggucgggauccugaaguacggcgggcgcguguggaccuuccacggcgagacgccccgggccaccaccgacagcuccaacaccgccaaccucgacgggaucagcaucacgauccacuccgaguucuacaucaucccccgcagccaggaguccaagugcaacgaguacaucaacaacggccugugaggacuaguuauaagacugacuagcccgaugggccucccaacgggcccuccuccccuccuugcaccgagauuaauaaaaaaaaaaaaaaaaaaaaaaaaaaaaaaaaaaaaaaaaaaaaaaaaaaaaaaaaaaaaaaaaaaaaaaaaaaaaaaaaaaaaaaaaaaaaaaaaaaaa

SEQ ID NO: 889 - RNA, 804 nt, Artificial Sequence
  mRNA product Design i-3 (A100) comprising derived and/or modified sequence from RVA/Wa-VirWa/P[8]__ACR22783.1__P2_VP8*(41-223) (opt1)
aggagaaagcuuaccaugcaguacaucaaggccaacagcaaguucaucggcaucaccgagcugggcagcggguccggcgcccagacccgguacgcgcccgugaacugggggcacggcgagaucaacgacuccaccaccguggagcccauccucgacgggcccuaccagccgacgaccuucaccccgcccaacgacuacuggauccugaucaacagcaacaccaacggcgucguguacgaguccacgaacaacagcgacuucuggaccgccguggucgccaucgagccccacgugaacccgguggaccgccaguacaccaucuucggggaguccaagcaguucaacguccggaacgacagcaacaaguggaaguuccuggagauguuccgcuccagcucccagaacgaguucuacaaccggcgcacccucacgagcgacacccggcuggugggcauccugaaguacggcgggcgcguguggaccuuccacggcgagaccccgcgggccacgaccgacuccagcuccaccgccaaccucaacaacaucagcaucaccauccacuccgaguucuacaucaucccccgcagccaggagagcaagugcaacgaguacaucaacaacgggcugugaggacuaguuauaagacugacuagcccgaugggccucccaacgggcccuccuccccuccuugcaccgagauuaauaaaaaaaaaaaaaaaaaaaaaaaaaaaaaaaaaaaaaaaaaaaaaaaaaaaaaaaaaaaaaaaaaaaaaaaaaaaaaaaaaaaaaaaaaaaaaaaaaaaa

SEQ ID NO: 890 - RNA, 804 nt, Artificial Sequence
  mRNA product Design i-3 (A100) comprising derived and/or modified sequence from RVA/Wa/P[8]__AAA47290.1__P2_VP8*(41-223) (opt1)
aggagaaagcuuaccaugcaguacaucaaggccaacagcaaguucaucggcaucaccgagcugggcagcggguccggcgcccagacccgguacgcgcccgugaacugggggcacggcgagaucaacgacuccaccaccguggagcccauccucgacgggcccuaccagccgacgaccuucaccccgcccaacgacuacuggauccugaucaacagcaacaccaacggcgucguguacgaguccacgaacaacagcgacuucuggaccgccguggucgccaucgagccccacgugaaccccguggaccgccaguacaccaucuucggggaguccaagcaguucaacgucagcaacgacuccaacaaguggaaguuccuggagauguuccggagcuccagccagaacgaguucuacaaccgccggacccucacguccgacacccgcuucgugggcauccugaaguacggcgggcggguguggaccuuccacggcgagacgccccgcgccaccaccgacagcuccagcaccgccaaccugaacaacaucuccaucaccauccacagcgaguucuacaucaucccccggagccaggaguccaagugcaacgaguacaucaacaacgggcugugaggacuaguuauaagacugacuagcccgaugggccucccaacgggcccuccuccccuccuugcaccgagauuaauaaaaaaaaaaaaaaaaaaaaaaaaaaaaaaaaaaaaaaaaaaaaaaaaaaaaaaaaaaaaaaaaaaaaaaaaaaaaaaaaaaaaaaaaaaaaaaaaaaaa

SEQ ID NO: 891 - RNA, 804 nt, Artificial Sequence
  mRNA product Design i-3 (A100) comprising derived and/or modified sequence from RVA/Wa/P[8]__AAA66953.1__P2_VP8*(41-223) (opt1)
aggagaaagcuuaccaugcaguacaucaaggccaacagcaaguucaucggcaucaccgagcugggcagcggguccggcgcccagacccgguacgcgcccgugaacugggggcacggcgagaucaacgacuccaccaccguggagcccaugcucgacgggcccuaccagccgacgaccuucaccccgcccaacgacuacuggauccugaucaacagcaacaccaacggcgucguguacgaguccacgaacaacagcgacuucuggaccgccguggucgccaucgagccccacgugaaccccguggaccgccaguacaccaucuucggggaguccaagcaguucaacgucagcaacgacuccaacaaguggaaguuccuggagauguuccggagcuccagccagaacgaguucuacaaccgccggacccucacguccgacacccgcuucgugggcauccugaaguacggcgggcggguguggaccuuccacggcgagacgccccgcgccaccaccgacagcuccagcaccgccaaccugaacaacaucuccaucaccauccacagcgaguucuacaucaucccccggagccaggaguccaagugcaacgaguacaucaacaacgggcugugaggacuaguuauaagacugacuagcccgaugggccucccaacgggcccuccuccccuccuugcaccgagauuaauaaaaaaaaaaaaaaaaaaaaaaaaaaaaaaaaaaaaaaaaaaaaaaaaaaaaaaaaaaaaaaaaaaaaaaaaaaaaaaaaaaaaaaaaaaaaaaaaaaaa

SEQ ID NO: 892 - RNA, 1230 nt, Artificial Sequence
  mRNA product Design i-3 (A100) comprising derived and/or modified sequence from RVA/BE1058/P[4]__AEX30665.1__P2_VP8*(65-223)_Ferritin (opt1)
aggagaaagcuuaccaugcaguacaucaaggccaacagcaaguucaucggcaucaccgagcugggcagcggguccggccucgacggccccuaccagcccacgaccuucaagccgcccaacgacuacuggcugcugaucuccagcaacaccgacgggguggucuacgaguccaccaacaacagcgacuucuggacggccgugaucgccguggagccccacgucaaccagaccaaccgccaguacgugcuguucggcgagaacaagcaguucaacaucgagaacuccagcgacaaguggaaguucuucgagauguucaagggcaacucccagagcgacuucuccaaccggcgcacccugaccagcuccaaccggcugguggggaugcucaaguacggcgggcgcgucuggacguuccacggcgagaccccgcgggccaccaccgacagcuccagcacggccgaccugaacaacaucuccaucaucauccacagcgaguucuacaucaucccccgcagccaggaguccaagugcaacgaguacaucaacaacgggcugagcggcggggacaucaucaagcuccugaacgagcaggugaacaaggagaugcaguccagcaaccuguacauguccaugagcuccuggugcuacacccacagccucgacggcgccgggcuguuccuguucgaccacgccgcggaggaguacgagcacgccaagaagcucaucaucuuccugaacgagaacaacguccccgugcagcugaccuccaucagcgccccggagcacaaguucgagggccucacgcagaucuuccagaaggccuacgagcacgagcagcacaucuccgagagcaucaacaacaucguggaccacgccaucaaguccaaggaccacgcgaccuucaacuuccugcagugguacgucgccgagcagcacgaggaggaggugcuguucaaggacauccucgacaagaucgagcugaucgggaacgagaaccacggccuguaccucgccgaccaguacgugaaggggaucgccaagagccgcaaguccugaggacuaguuauaagacugacuagcccgaugggccucccaacgggcccuccuccccuccuugcaccgagauuaauaaaaaaaaaaaaaaaaaaaaaaaaaaaaaaaaaaaaaaaaaaaaaaaaaaaaaaaaaaaaaaaaaaaaaaaaaaaaaaaaaaaaaaaaaaaaaaaaaaaa

SEQ ID NO: 893 - RNA, 1230 nt, Artificial Sequence
  mRNA product Design i-3 (A100) comprising derived and/or modified sequence from RVA/DS-1/P[4]__CAD62680.1__P2_VP8*(65-223)_Ferritin (opt1)
aggagaaagcuuaccaugcaguacaucaaggccaacagcaaguucaucggcaucaccgagcugggcagcggguccggccucgacgggcccuaccagccgacgaccuucaagccgcccaacgacuacuggcugcugaucuccagcaacaccaacggcguggucuacgaguccaccaacaacaacgacuucuggacggccgugagcuccguggagccccacgucagccagaccaaccgccaguacauccucuucggggagaacaagcaguucaacguggagaacaacuccgacaaguggaaguucuucgagaccuucaccggcagcucccagggcaacuucagcaaccggcgcacgcugaccuccagcaaccggcugguggggaugcucaaguacggcgggcgcgucuggaccuuccacggcgagacgccccgggccaccaccgacuccagcaacaccgccgaccugaacaacaucagcaucaucauccacuccgaguucuacaucaucccccgcagccaggaguccaagugcaacgaguacaucaacaacgggcugagcggcggggacaucaucaagcuccugaacgagcaggugaacaaggagaugcaguccagcaaccuguacauguccaugagcuccuggugcuacacccacagccucgacggcgccgggcuguuccuguucgaccacgccgcggaggaguacgagcacgccaagaagcucaucaucuuccugaacgagaacaacguccccgugcagcugaccuccaucagcgccccggagcacaaguucgagggccucacgcagaucuuccagaaggccuacgagcacgagcagcacaucuccgagagcaucaacaacaucguggaccacgccaucaaguccaaggaccacgcgaccuucaacuuccugcagugguacgucgccgagcagcacgaggaggaggugcuguucaaggacauccucgacaagaucgagcugaucgggaacgagaaccacggccuguaccucgccgaccaguacgugaaggggaucgccaagagccgcaaguccugaggacuaguuauaagacugacuagcccgaugggccucccaacgggcccuccuccccuccuugcaccgagauuaauaaaaaaaaaaaaaaaaaaaaaaaaaaaaaaaaaaaaaaaaaaaaaaaaaaaaaaaaaaaaaaaaaaaaaaaaaaaaaaaaaaaaaaaaaaaaaaaaaaaa

SEQ ID NO: 894 - RNA, 1230 nt, Artificial Sequence; identical to SEQ ID NO: 893
  mRNA product Design i-3 (A100) comprising derived and/or modified sequence from RVA/DS-1/P[4]__ABV53252.1__P2_VP8*(65-223)_Ferritin (opt1)

SEQ ID NO: 895 - RNA, 1230 nt, Artificial Sequence
  mRNA product Design i-3 (A100) comprising derived and/or modified sequence from RVA/F01322/P[6]__AFA51886.1__P2_VP8*(65-223)_Ferritin (opt1)
aggagaaagcuuaccaugcaguacaucaaggccaacagcaaguucaucggcaucaccgagcugggcagcggguccggccucgacgggcccuaccagccgaccaacuucaagccgcccaacgacuacuggauccugcugaaccccaccaaccagcagguggugcucgagggcacgaacaagaccgacaucugggucgcccugcugcucguggagccgaacgugaccaaccagagccggcaguacacccuguucggggagacgaagcagaucaccgucgagaacaacaccaacaaguggaaguucuucgagauguuccgcuccagcguguccgccgaguuccagcacaagcggacccugacgagcgacaccaagcucgccggcuucaugaaguucuacaacuccguguggaccuuccacggcgagacccccaacgccacgaccgacuacagcuccaccagcaaccuguucgaggucgagaccgugauccacguggaguucuacaucaucccccgcucccaggagagcaagugcuccgaguacaucaacacggggcugagcggcggggacaucaucaagcuccugaacgagcaggugaacaaggagaugcaguccagcaaccuguacauguccaugagcuccuggugcuacacccacagccucgacggcgccgggcuguuccuguucgaccacgccgcggaggaguacgagcacgccaagaagcucaucaucuuccugaacgagaacaacguccccgugcagcugaccuccaucagcgccccggagcacaaguucgagggccucacgcagaucuuccagaaggccuacgagcacgagcagcacaucuccgagagcaucaacaacaucguggaccacgccaucaaguccaaggaccacgcgaccuucaacuuccugcagugguacgucgccgagcagcacgaggaggaggugcuguucaaggacauccucgacaagaucgagcugaucgggaacgagaaccacggccuguaccucgccgaccaguacgugaaggggaucgccaagagccgcaaguccugaggacuaguuauaagacugacuagcccgaugggccucccaacgggcccuccuccccuccuugcaccgagauuaauaaaaaaaaaaaaaaaaaaaaaaaaaaaaaaaaaaaaaaaaaaaaaaaaaaaaaaaaaaaaaaaaaaaaaaaaaaaaaaaaaaaaaaaaaaaaaaaaaaaa

SEQ ID NO: 896 - RNA, 1230 nt, Artificial Sequence
  mRNA product Design i-3 (A100) comprising derived and/or modified sequence from RVA/1076/P[6]__AAA47337.1__P2_VP8*(65-223)_Ferritin (opt1)
aggagaaagcuuaccaugcaguacaucaaggccaacagcaaguucaucggcaucaccgagcugggcagcggguccggccucgacgggcccuaccagccgaccuccuucaagccgcccagcgacuacuggauccugcugaaccccaccaaccagcaggucgugcucgagggcacgaacaagaccgacaucuggguggcccugcugcucguggagcccaacgugaccaaccagucccggcaguacacccuguucggggagacgaagcagaucaccgucgagaacaacaccaacaaguggaaguucuucgagauguuccgcagcuccgugagcgccgaguuccagcacaagcggacccugacguccgacaccaagcucgccggcuuccugaaguucuacaacagcguguggaccuucuacggcgagacgccccacgccaccaccgacuacuccagcaccuccaaccugagcgaggucgagaccgcgauccacguggaguucuacaucaucccccgcucccaggagagcaagugcaacgaguacaucaacacggggcugagcggcggggacaucaucaagcuccugaacgagcaggugaacaaggagaugcaguccagcaaccuguacauguccaugagcuccuggugcuacacccacagccucgacggcgccgggcuguuccuguucgaccacgccgcggaggaguacgagcacgccaagaagcucaucaucuuccugaacgagaacaacguccccgugcagcugaccuccaucagcgccccggagcacaaguucgagggccucacgcagaucuuccagaaggccuacgagcacgagcagcacaucuccgagagcaucaacaacaucguggaccacgccaucaaguccaaggaccacgcgaccuucaacuuccugcagugguacgucgccgagcagcacgaggaggaggugcuguucaaggacauccucgacaagaucgagcugaucgggaacgagaaccacggccuguaccucgccgaccaguacgugaaggggaucgccaagagccgcaaguccugaggacuaguuauaagacugacuagcccgaugggccucccaacgggcccuccuccccuccuugcaccgagauuaauaaaaaaaaaaaaaaaaaaaaaaaaaaaaaaaaaaaaaaaaaaaaaaaaaaaaaaaaaaaaaaaaaaaaaaaaaaaaaaaaaaaaaaaaaaaaaaaaaaaa

SEQ ID NO: 897 - RNA, 1230 nt, Artificial Sequence
  mRNA product Design i-3 (A100) comprising derived and/or modified sequence from RVA/BE1128/P[8]__AEX30671.1__P2_VP8*(65-223)_Ferritin (opt1)
aggagaaagcuuaccaugcaguacaucaaggccaacagcaaguucaucggcaucaccgagcugggcagcggguccggccucgacggcccguaccagccgacgaccuucaccccgcccaccgacuacuggauccugaucacguccaacaccaacggggugguguacgagagcaccaacaacuccgacuucuggaccgccgucaucgccguggagccccacgugaacccggucgaccgccaguacaacguguucggcgagaacaagcaguucaacgugcggaacgacagcgacaaguggaaguuccuggagauguuccgcggcuccagccagaacgacuucuacaaccggcgcacgcucaccuccgacacccggcuggucgggauccugaaguacggcgggcgcguguggaccuuccacggcgagacgccccgggccaccaccgacagcuccaacaccgccaaccucgacgggaucagcaucacgauccacuccgaguucuacaucaucccccgcagccaggaguccaagugcaacgaguacaucaacaacggccugagcggcggggacaucaucaagcuccugaacgagcaggugaacaaggagaugcaguccagcaaccuguacauguccaugagcuccuggugcuacacccacagccucgacggcgccgggcuguuccuguucgaccacgccgcggaggaguacgagcacgccaagaagcucaucaucuuccugaacgagaacaacguccccgugcagcugaccuccaucagcgccccggagcacaaguucgagggccucacgcagaucuuccagaaggccuacgagcacgagcagcacaucuccgagagcaucaacaacaucguggaccacgccaucaaguccaaggaccacgcgaccuucaacuuccugcagugguacgucgccgagcagcacgaggaggaggugcuguucaaggacauccucgacaagaucgagcugaucgggaacgagaaccacggccuguaccucgccgaccaguacgugaaggggaucgccaagagccgcaaguccugaggacuaguuauaagacugacuagcccgaugggccucccaacgggcccuccuccccuccuugcaccgagauuaauaaaaaaaaaaaaaaaaaaaaaaaaaaaaaaaaaaaaaaaaaaaaaaaaaaaaaaaaaaaaaaaaaaaaaaaaaaaaaaaaaaaaaaaaaaaaaaaaaaaa

SEQ ID NO: 898 - RNA, 1230 nt, Artificial Sequence
  mRNA product Design i-3 (A100) comprising derived and/or modified sequence from RVA/Wa-VirWa/P[8]__ACR22783.1__P2_VP8*(65-223)_Ferritin (opt1)
aggagaaagcuuaccaugcaguacaucaaggccaacagcaaguucaucggcaucaccgagcugggcagcggguccggccucgacgggcccuaccagccgacgaccuucaccccgcccaacgacuacuggauccugaucaacagcaacaccaacggcgucguguacgaguccacgaacaacagcgacuucuggaccgccguggucgccaucgagccccacgugaacccgguggaccgccaguacaccaucuucggggaguccaagcaguucaacguccggaacgacagcaacaaguggaaguuccuggagauguuccgcuccagcucccagaacgaguucuacaaccggcgcacccucacgagcgacacccggcuggugggcauccugaaguacggcgggcgcguguggaccuuccacggcgagaccccgcgggccacgaccgacuccagcuccaccgccaaccucaacaacaucagcaucaccauccacuccgaguucuacaucaucccccgcagccaggagagcaagugcaacgaguacaucaacaacgggcugagcggcggggacaucaucaagcuccugaacgagcaggugaacaaggagaugcaguccagcaaccuguacauguccaugagcuccuggugcuacacccacagccucgacggcgccgggcuguuccuguucgaccacgccgcggaggaguacgagcacgccaagaagcucaucaucuuccugaacgagaacaacguccccgugcagcugaccuccaucagcgccccggagcacaaguucgagggccucacgcagaucuuccagaaggccuacgagcacgagcagcacaucuccgagagcaucaacaacaucguggaccacgccaucaaguccaaggaccacgcgaccuucaacuuccugcagugguacgucgccgagcagcacgaggaggaggugcuguucaaggacauccucgacaagaucgagcugaucgggaacgagaaccacggccuguaccucgccgaccaguacgugaaggggaucgccaagagccgcaaguccugaggacuaguuauaagacugacuagcccgaugggccucccaacgggcccuccuccccuccuugcaccgagauuaauaaaaaaaaaaaaaaaaaaaaaaaaaaaaaaaaaaaaaaaaaaaaaaaaaaaaaaaaaaaaaaaaaaaaaaaaaaaaaaaaaaaaaaaaaaaaaaaaaaaa

SEQ ID NO: 899 - RNA, 1230 nt, Artificial Sequence
  mRNA product Design i-3 (A100) comprising derived and/or modified sequence from RVA/Wa/P[8]__AAA47290.1__P2_VP8*(65-223)_Ferritin (opt1)
aggagaaagcuuaccaugcaguacaucaaggccaacagcaaguucaucggcaucaccgagcugggcagcggguccggccucgacgggcccuaccagccgacgaccuucaccccgcccaacgacuacuggauccugaucaacagcaacaccaacggcgucguguacgaguccacgaacaacagcgacuucuggaccgccguggucgccaucgagccccacgugaaccccguggaccgccaguacaccaucuucggggaguccaagcaguucaacgucagcaacgacuccaacaaguggaaguuccuggagauguuccggagcuccagccagaacgaguucuacaaccgccggacccucacguccgacacccgcuucgugggcauccugaaguacggcgggcggguguggaccuuccacggcgagacgccccgcgccaccaccgacagcuccagcaccgccaaccugaacaacaucuccaucaccauccacagcgaguucuacaucaucccccggagccaggaguccaagugcaacgaguacaucaacaacgggcugagcggcggggacaucaucaagcuccugaacgagcaggugaacaaggagaugcaguccagcaaccuguacauguccaugagcuccuggugcuacacccacagccucgacggcgccgggcuguuccuguucgaccacgccgcggaggaguacgagcacgccaagaagcucaucaucuuccugaacgagaacaacguccccgugcagcugaccuccaucagcgccccggagcacaaguucgagggccucacgcagaucuuccagaaggccuacgagcacgagcagcacaucuccgagagcaucaacaacaucguggaccacgccaucaaguccaaggaccacgcgaccuucaacuuccugcagugguacgucgccgagcagcacgaggaggaggugcuguucaaggacauccucgacaagaucgagcugaucgggaacgagaaccacggccuguaccucgccgaccaguacgugaaggggaucgccaagagccgcaaguccugaggacuaguuauaagacugacuagcccgaugggccucccaacgggcccuccuccccuccuugcaccgagauuaauaaaaaaaaaaaaaaaaaaaaaaaaaaaaaaaaaaaaaaaaaaaaaaaaaaaaaaaaaaaaaaaaaaaaaaaaaaaaaaaaaaaaaaaaaaaaaaaaaaaa

SEQ ID NO: 900 - RNA, 1230 nt, Artificial Sequence; identical to SEQ ID NO: 899
  mRNA product Design i-3 (A100) comprising derived and/or modified sequence from RVA/Wa/P[8]__AAA66953.1__P2_VP8*(65-223)_Ferritin (opt1)

SEQ ID NO: 901 - RNA, 1302 nt, Artificial Sequence
  mRNA product Design i-3 (A100) comprising derived and/or modified sequence from RVA/BE1058/P[4]__AEX30665.1__P2_VP8*(41-223)_Ferritin (opt1)
aggagaaagcuuaccaugcaguacaucaaggccaacagcaaguucaucggcaucaccgagcugggcagcggguccggcgcccagacccgguacgcgcccgugaacuggggccacggggagaucaacgacagcaccaccgucgagcccgugcucgacggccccuaccagcccacgaccuucaagccgcccaacgacuacuggcugcugaucuccagcaacaccgacgggguggucuacgaguccaccaacaacagcgacuucuggacggccgugaucgccguggagccccacgucaaccagaccaaccgccaguacgugcuguucggcgagaacaagcaguucaacaucgagaacuccagcgacaaguggaaguucuucgagauguucaagggcaacucccagagcgacuucuccaaccggcgcacccugaccagcuccaaccggcugguggggaugcucaaguacggcgggcgcgucuggacguuccacggcgagaccccgcgggccaccaccgacagcuccagcacggccgaccugaacaacaucuccaucaucauccacagcgaguucuacaucaucccccgcagccaggaguccaagugcaacgaguacaucaacaacgggcugagcggcggggacaucaucaagcuccugaacgagcaggugaacaaggagaugcaguccagcaaccuguacauguccaugagcuccuggugcuacacccacagccucgacggcgccgggcuguuccuguucgaccacgccgcggaggaguacgagcacgccaagaagcucaucaucuuccugaacgagaacaacguccccgugcagcugaccuccaucagcgccccggagcacaaguucgagggccucacgcagaucuuccagaaggccuacgagcacgagcagcacaucuccgagagcaucaacaacaucguggaccacgccaucaaguccaaggaccacgcgaccuucaacuuccugcagugguacgucgccgagcagcacgaggaggaggugcuguucaaggacauccucgacaagaucgagcugaucgggaacgagaaccacggccuguaccucgccgaccaguacgugaaggggaucgccaagagccgcaaguccugaggacuaguuauaagacugacuagcccgaugggccucccaacgggcccuccuccccuccuugcaccgagauuaauaaaaaaaaaaaaaaaaaaaaaaaaaaaaaaaaaaaaaaaaaaaaaaaaaaaaaaaaaaaaaaaaaaaaaaaaaaaaaaaaaaaaaaaaaaaaaaaaaaaa

SEQ ID NO: 902 - RNA, 1302 nt, Artificial Sequence
  mRNA product Design i-3 (A100) comprising derived and/or modified sequence from RVA/DS-1/P[4]__CAD62680.1__P2_VP8*(41-223)_Ferritin (opt1)
aggagaaagcuuaccaugcaguacaucaaggccaacagcaaguucaucggcaucaccgagcugggcagcggguccggcgcccagacccgguacgcgcccgugaacuggggcuccugggagaucaacgacagcaccaccgucgagcccgugcucgacgggcccuaccagccgacgaccuucaagccgcccaacgacuacuggcugcugaucuccagcaacaccaacggcguggucuacgaguccaccaacaacaacgacuucuggacggccgugagcuccguggagccccacgucagccagaccaaccgccaguacauccucuucggggagaacaagcaguucaacguggagaacaacuccgacaaguggaaguucuucgagaccuucaccggcagcucccagggcaacuucagcaaccggcgcacgcugaccuccagcaaccggcugguggggaugcucaaguacggcgggcgcgucuggaccuuccacggcgagacgccccgggccaccaccgacuccagcaacaccgccgaccugaacaacaucagcaucaucauccacuccgaguucuacaucaucccccgcagccaggaguccaagugcaacgaguacaucaacaacgggcugagcggcggggacaucaucaagcuccugaacgagcaggugaacaaggagaugcaguccagcaaccuguacauguccaugagcuccuggugcuacacccacagccucgacggcgccgggcuguuccuguucgaccacgccgcggaggaguacgagcacgccaagaagcucaucaucuuccugaacgagaacaacguccccgugcagcugaccuccaucagcgccccggagcacaaguucgagggccucacgcagaucuuccagaaggccuacgagcacgagcagcacaucuccgagagcaucaacaacaucguggaccacgccaucaaguccaaggaccacgcgaccuucaacuuccugcagugguacgucgccgagcagcacgaggaggaggugcuguucaaggacauccucgacaagaucgagcugaucgggaacgagaaccacggccuguaccucgccgaccaguacgugaaggggaucgccaagagccgcaaguccugaggacuaguuauaagacugacuagcccgaugggccucccaacgggcccuccuccccuccuugcaccgagauuaauaaaaaaaaaaaaaaaaaaaaaaaaaaaaaaaaaaaaaaaaaaaaaaaaaaaaaaaaaaaaaaaaaaaaaaaaaaaaaaaaaaaaaaaaaaaaaaaaaaaa

SEQ ID NO: 903 - RNA, 1302 nt, Artificial Sequence; identical to SEQ ID NO: 902
  mRNA product Design i-3 (A100) comprising derived and/or modified sequence from RVA/DS-1/P[4]__ABV53252.1__P2_VP8*(41-223)_Ferritin (opt1)

SEQ ID NO: 904 - RNA, 1302 nt, Artificial Sequence
  mRNA product Design i-3 (A100) comprising derived and/or modified sequence from RVA/F01322/P[6]__AFA51886.1__P2_VP8*(41-223)_Ferritin (opt1)
aggagaaagcuuaccaugcaguacaucaaggccaacagcaaguucaucggcaucaccgagcugggcagcggguccggcgcccagaccaacuacgcgcccgugaccuggagccacggcgaggugaacgacuccacgaccaucgagcccguccucgacgggcccuaccagccgaccaacuucaagccgcccaacgacuacuggauccugcugaaccccaccaaccagcagguggugcucgagggcacgaacaagaccgacaucugggucgcccugcugcucguggagccgaacgugaccaaccagagccggcaguacacccuguucggggagacgaagcagaucaccgucgagaacaacaccaacaaguggaaguucuucgagauguuccgcuccagcguguccgccgaguuccagcacaagcggacccugacgagcgacaccaagcucgccggcuucaugaaguucuacaacuccguguggaccuuccacggcgagacccccaacgccacgaccgacuacagcuccaccagcaaccuguucgaggucgagaccgugauccacguggaguucuacaucaucccccgcucccaggagagcaagugcuccgaguacaucaacacggggcugagcggcggggacaucaucaagcuccugaacgagcaggugaacaaggagaugcaguccagcaaccuguacauguccaugagcuccuggugcuacacccacagccucgacggcgccgggcuguuccuguucgaccacgccgcggaggaguacgagcacgccaagaagcucaucaucuuccugaacgagaacaacguccccgugcagcugaccuccaucagcgccccggagcacaaguucgagggccucacgcagaucuuccagaaggccuacgagcacgagcagcacaucuccgagagcaucaacaacaucguggaccacgccaucaaguccaaggaccacgcgaccuucaacuuccugcagugguacgucgccgagcagcacgaggaggaggugcuguucaaggacauccucgacaagaucgagcugaucgggaacgagaaccacggccuguaccucgccgaccaguacgugaaggggaucgccaagagccgcaaguccugaggacuaguuauaagacugacuagcccgaugggccucccaacgggcccuccuccccuccuugcaccgagauuaauaaaaaaaaaaaaaaaaaaaaaaaaaaaaaaaaaaaaaaaaaaaaaaaaaaaaaaaaaaaaaaaaaaaaaaaaaaaaaaaaaaaaaaaaaaaaaaaaaaaa

SEQ ID NO: 905 - RNA, 1302 nt, Artificial Sequence
  mRNA product Design i-3 (A100) comprising derived and/or modified sequence from RVA/1076/P[6]__AAA47337.1__P2_VP8*(41-223)_Ferritin (opt1)
aggagaaagcuuaccaugcaguacaucaaggccaacagcaaguucaucggcaucaccgagcugggcagcggguccggcgcccagaccaacuacgcgcccgugaccuggagccacggcgaggugaacgacagcacgaccaucgagcccguccucgacgggcccuaccagccgaccuccuucaagccgcccagcgacuacuggauccugcugaaccccaccaaccagcaggucgugcucgagggcacgaacaagaccgacaucuggguggcccugcugcucguggagcccaacgugaccaaccagucccggcaguacacccuguucggggagacgaagcagaucaccgucgagaacaacaccaacaaguggaaguucuucgagauguuccgcagcuccgugagcgccgaguuccagcacaagcggacccugacguccgacaccaagcucgccggcuuccugaaguucuacaacagcguguggaccuucuacggcgagacgccccacgccaccaccgacuacuccagcaccuccaaccugagcgaggucgagaccgcgauccacguggaguucuacaucaucccccgcucccaggagagcaagugcaacgaguacaucaacacggggcugagcggcggggacaucaucaagcuccugaacgagcaggugaacaaggagaugcaguccagcaaccuguacauguccaugagcuccuggugcuacacccacagccucgacggcgccgggcuguuccuguucgaccacgccgcggaggaguacgagcacgccaagaagcucaucaucuuccugaacgagaacaacguccccgugcagcugaccuccaucagcgccccggagcacaaguucgagggccucacgcagaucuuccagaaggccuacgagcacgagcagcacaucuccgagagcaucaacaacaucguggaccacgccaucaaguccaaggaccacgcgaccuucaacuuccugcagugguacgucgccgagcagcacgaggaggaggugcuguucaaggacauccucgacaagaucgagcugaucgggaacgagaaccacggccuguaccucgccgaccaguacgugaaggggaucgccaagagccgcaaguccugaggacuaguuauaagacugacuagcccgaugggccucccaacgggcccuccuccccuccuugcaccgagauuaauaaaaaaaaaaaaaaaaaaaaaaaaaaaaaaaaaaaaaaaaaaaaaaaaaaaaaaaaaaaaaaaaaaaaaaaaaaaaaaaaaaaaaaaaaaaaaaaaaaaa

SEQ ID NO: 906 - RNA, 1302 nt, Artificial Sequence
  mRNA product Design i-3 (A100) comprising derived and/or modified sequence from RVA/BE1128/P[8]__AEX30671.1__P2_VP8*(41-223)_Ferritin (opt1)
aggagaaagcuuaccaugcaguacaucaaggccaacagcaaguucaucggcaucaccgagcugggcagcggguccggcgcccagacccgguacgcgcccgugaacuggggccacggggagaucaacgacagcaccaccgucgagcccauccucgacggcccguaccagccgacgaccuucaccccgcccaccgacuacuggauccugaucacguccaacaccaacggggugguguacgagagcaccaacaacuccgacuucuggaccgccgucaucgccguggagccccacgugaacccggucgaccgccaguacaacguguucggcgagaacaagcaguucaacgugcggaacgacagcgacaaguggaaguuccuggagauguuccgcggcuccagccagaacgacuucuacaaccggcgcacgcucaccuccgacacccggcuggucgggauccugaaguacggcgggcgcguguggaccuuccacggcgagacgccccgggccaccaccgacagcuccaacaccgccaaccucgacgggaucagcaucacgauccacuccgaguucuacaucaucccccgcagccaggaguccaagugcaacgaguacaucaacaacggccugagcggcggggacaucaucaagcuccugaacgagcaggugaacaaggagaugcaguccagcaaccuguacauguccaugagcuccuggugcuacacccacagccucgacggcgccgggcuguuccuguucgaccacgccgcggaggaguacgagcacgccaagaagcucaucaucuuccugaacgagaacaacguccccgugcagcugaccuccaucagcgccccggagcacaaguucgagggccucacgcagaucuuccagaaggccuacgagcacgagcagcacaucuccgagagcaucaacaacaucguggaccacgccaucaaguccaaggaccacgcgaccuucaacuuccugcagugguacgucgccgagcagcacgaggaggaggugcuguucaaggacauccucgacaagaucgagcugaucgggaacgagaaccacggccuguaccucgccgaccaguacgugaaggggaucgccaagagccgcaaguccugaggacuaguuauaagacugacuagcccgaugggccucccaacgggcccuccuccccuccuugcaccgagauuaauaaaaaaaaaaaaaaaaaaaaaaaaaaaaaaaaaaaaaaaaaaaaaaaaaaaaaaaaaaaaaaaaaaaaaaaaaaaaaaaaaaaaaaaaaaaaaaaaaaaa

SEQ ID NO: 907 - RNA, 1302 nt, Artificial Sequence
  mRNA product Design i-3 (A100) comprising derived and/or modified sequence from RVA/Wa-VirWa/P[8]__ACR22783.1__P2_VP8*(41-223)_Ferritin (opt1)
aggagaaagcuuaccaugcaguacaucaaggccaacagcaaguucaucggcaucaccgagcugggcagcggguccggcgcccagacccgguacgcgcccgugaacugggggcacggcgagaucaacgacuccaccaccguggagcccauccucgacgggcccuaccagccgacgaccuucaccccgcccaacgacuacuggauccugaucaacagcaacaccaacggcgucguguacgaguccacgaacaacagcgacuucuggaccgccguggucgccaucgagccccacgugaacccgguggaccgccaguacaccaucuucggggaguccaagcaguucaacguccggaacgacagcaacaaguggaaguuccuggagauguuccgcuccagcucccagaacgaguucuacaaccggcgcacccucacgagcgacacccggcuggugggcauccugaaguacggcgggcgcguguggaccuuccacggcgagaccccgcgggccacgaccgacuccagcuccaccgccaaccucaacaacaucagcaucaccauccacuccgaguucuacaucaucccccgcagccaggagagcaagugcaacgaguacaucaacaacgggcugagcggcggggacaucaucaagcuccugaacgagcaggugaacaaggagaugcaguccagcaaccuguacauguccaugagcuccuggugcuacacccacagccucgacggcgccgggcuguuccuguucgaccacgccgcggaggaguacgagcacgccaagaagcucaucaucuuccugaacgagaacaacguccccgugcagcugaccuccaucagcgccccggagcacaaguucgagggccucacgcagaucuuccagaaggccuacgagcacgagcagcacaucuccgagagcaucaacaacaucguggaccacgccaucaaguccaaggaccacgcgaccuucaacuuccugcagugguacgucgccgagcagcacgaggaggaggugcuguucaaggacauccucgacaagaucgagcugaucgggaacgagaaccacggccuguaccucgccgaccaguacgugaaggggaucgccaagagccgcaaguccugaggacuaguuauaagacugacuagcccgaugggccucccaacgggcccuccuccccuccuugcaccgagauuaauaaaaaaaaaaaaaaaaaaaaaaaaaaaaaaaaaaaaaaaaaaaaaaaaaaaaaaaaaaaaaaaaaaaaaaaaaaaaaaaaaaaaaaaaaaaaaaaaaaaa

SEQ ID NO: 908 - RNA, 1302 nt, Artificial Sequence
  mRNA product Design i-3 (A100) comprising derived and/or modified sequence from RVA/Wa/P[8]__AAA47290.1__P2_VP8*(41-223)_Ferritin (opt1)
aggagaaagcuuaccaugcaguacaucaaggccaacagcaaguucaucggcaucaccgagcugggcagcggguccggcgcccagacccgguacgcgcccgugaacugggggcacggcgagaucaacgacuccaccaccguggagcccauccucgacgggcccuaccagccgacgaccuucaccccgcccaacgacuacuggauccugaucaacagcaacaccaacggcgucguguacgaguccacgaacaacagcgacuucuggaccgccguggucgccaucgagccccacgugaaccccguggaccgccaguacaccaucuucggggaguccaagcaguucaacgucagcaacgacuccaacaaguggaaguuccuggagauguuccggagcuccagccagaacgaguucuacaaccgccggacccucacguccgacacccgcuucgugggcauccugaaguacggcgggcggguguggaccuuccacggcgagacgccccgcgccaccaccgacagcuccagcaccgccaaccugaacaacaucuccaucaccauccacagcgaguucuacaucaucccccggagccaggaguccaagugcaacgaguacaucaacaacgggcugagcggcggggacaucaucaagcuccugaacgagcaggugaacaaggagaugcaguccagcaaccuguacauguccaugagcuccuggugcuacacccacagccucgacggcgccgggcuguuccuguucgaccacgccgcggaggaguacgagcacgccaagaagcucaucaucuuccugaacgagaacaacguccccgugcagcugaccuccaucagcgccccggagcacaaguucgagggccucacgcagaucuuccagaaggccuacgagcacgagcagcacaucuccgagagcaucaacaacaucguggaccacgccaucaaguccaaggaccacgcgaccuucaacuuccugcagugguacgucgccgagcagcacgaggaggaggugcuguucaaggacauccucgacaagaucgagcugaucgggaacgagaaccacggccuguaccucgccgaccaguacgugaaggggaucgccaagagccgcaaguccugaggacuaguuauaagacugacuagcccgaugggccucccaacgggcccuccuccccuccuugcaccgagauuaauaaaaaaaaaaaaaaaaaaaaaaaaaaaaaaaaaaaaaaaaaaaaaaaaaaaaaaaaaaaaaaaaaaaaaaaaaaaaaaaaaaaaaaaaaaaaaaaaaaaa

SEQ ID NO: 909 - RNA, 1302 nt, Artificial Sequence
  mRNA product Design i-3 (A100) comprising derived and/or modified sequence from RVA/Wa/P[8]__AAA66953.1__P2_VP8*(41-223)_Ferritin (opt1)
aggagaaagcuuaccaugcaguacaucaaggccaacagcaaguucaucggcaucaccgagcugggcagcggguccggcgcccagacccgguacgcgcccgugaacugggggcacggcgagaucaacgacuccaccaccguggagcccaugcucgacgggcccuaccagccgacgaccuucaccccgcccaacgacuacuggauccugaucaacagcaacaccaacggcgucguguacgaguccacgaacaacagcgacuucuggaccgccguggucgccaucgagccccacgugaaccccguggaccgccaguacaccaucuucggggaguccaagcaguucaacgucagcaacgacuccaacaaguggaaguuccuggagauguuccggagcuccagccagaacgaguucuacaaccgccggacccucacguccgacacccgcuucgugggcauccugaaguacggcgggcggguguggaccuuccacggcgagacgccccgcgccaccaccgacagcuccagcaccgccaaccugaacaacaucuccaucaccauccacagcgaguucuacaucaucccccggagccaggaguccaagugcaacgaguacaucaacaacgggcugagcggcggggacaucaucaagcuccugaacgagcaggugaacaaggagaugcaguccagcaaccuguacauguccaugagcuccuggugcuacacccacagccucgacggcgccgggcuguuccuguucgaccacgccgcggaggaguacgagcacgccaagaagcucaucaucuuccugaacgagaacaacguccccgugcagcugaccuccaucagcgccccggagcacaaguucgagggccucacgcagaucuuccagaaggccuacgagcacgagcagcacaucuccgagagcaucaacaacaucguggaccacgccaucaaguccaaggaccacgcgaccuucaacuuccugcagugguacgucgccgagcagcacgaggaggaggugcuguucaaggacauccucgacaagaucgagcugaucgggaacgagaaccacggccuguaccucgccgaccaguacgugaaggggaucgccaagagccgcaaguccugaggacuaguuauaagacugacuagcccgaugggccucccaacgggcccuccuccccuccuugcaccgagauuaauaaaaaaaaaaaaaaaaaaaaaaaaaaaaaaaaaaaaaaaaaaaaaaaaaaaaaaaaaaaaaaaaaaaaaaaaaaaaaaaaaaaaaaaaaaaaaaaaaaaa

SEQ ID NO: 910 - RNA, 1236 nt, Artificial Sequence
  mRNA product Design i-3 (A100) comprising derived and/or modified sequence from RVA/BE1058/P[4]__AEX30665.1__LumSynt_P2_VP8*(65-223) (opt1)
aggagaaagcuuaccaugcagaucuacgagggcaagcugaccgccgaggggcuccgcuucggcaucguggccagccgguucaaccacgcgcuggucgaccgccugguggagggggccaucgacgccaucgugcggcacggcgggcgcgaggaggacaucacccucguccgggugcccggcuccugggagaucccgguggccgccggcgagcuggcccgcaaggaggacaucgacgcggucaucgccaucggggugcugauccggggcgccacgccccacuucgacuacaucgccagcgagguguccaaggggcucgcggaccugagccuggagcuccgcaagcccaucaccuucggcgucaucaccgccgacacccuggagcaggccaucgagcgggccgggacgaagcacggcaacaagggcugggaggccgcgcuguccgccaucgagauggccaaccucuucaagagccugcgcggcgggagcggcggguccggcgggagcggcggcuccgggggcgggcaguacaucaaggccaacagcaaguucaucggcaucaccgagcugggcagcggguccggccucgacggccccuaccagcccacgaccuucaagccgcccaacgacuacuggcugcugaucuccagcaacaccgacgggguggucuacgaguccaccaacaacagcgacuucuggacggccgugaucgccguggagccccacgucaaccagaccaaccgccaguacgugcuguucggcgagaacaagcaguucaacaucgagaacuccagcgacaaguggaaguucuucgagauguucaagggcaacucccagagcgacuucuccaaccggcgcacccugaccagcuccaaccggcugguggggaugcucaaguacggcgggcgcgucuggacguuccacggcgagaccccgcgggccaccaccgacagcuccagcacggccgaccugaacaacaucuccaucaucauccacagcgaguucuacaucaucccccgcagccaggaguccaagugcaacgaguacaucaacaacgggcugugaggacuaguuauaagacugacuagcccgaugggccucccaacgggcccuccuccccuccuugcaccgagauuaauaaaaaaaaaaaaaaaaaaaaaaaaaaaaaaaaaaaaaaaaaaaaaaaaaaaaaaaaaaaaaaaaaaaaaaaaaaaaaaaaaaaaaaaaaaaaaaaaaaaa

SEQ ID NO: 911 - RNA, 1236 nt, Artificial Sequence
  mRNA product Design i-3 (A100) comprising derived and/or modified sequence from RVA/DS-1/P[4]__CAD62680.1__LumSynt_P2_VP8*(65-223) (opt1)
aggagaaagcuuaccaugcagaucuacgagggcaagcugaccgccgaggggcuccgcuucggcaucguggccagccgguucaaccacgcgcuggucgaccgccugguggagggggccaucgacgccaucgugcggcacggcgggcgcgaggaggacaucacccucguccgggugcccggcuccugggagaucccgguggccgccggcgagcuggcccgcaaggaggacaucgacgcggucaucgccaucggggugcugauccggggcgccacgccccacuucgacuacaucgccagcgagguguccaaggggcucgcggaccugagccuggagcuccgcaagcccaucaccuucggcgucaucaccgccgacacccuggagcaggccaucgagcgggccgggacgaagcacggcaacaagggcugggaggccgcgcuguccgccaucgagauggccaaccucuucaagagccugcgcggcgggagcggcggguccggcgggagcggcggcuccgggggcgggcaguacaucaaggccaacagcaaguucaucggcaucaccgagcugggcagcggguccggccucgacgggcccuaccagccgacgaccuucaagccgcccaacgacuacuggcugcugaucuccagcaacaccaacggcguggucuacgaguccaccaacaacaacgacuucuggacggccgugagcuccguggagccccacgucagccagaccaaccgccaguacauccucuucggggagaacaagcaguucaacguggagaacaacuccgacaaguggaaguucuucgagaccuucaccggcagcucccagggcaacuucagcaaccggcgcacgcugaccuccagcaaccggcugguggggaugcucaaguacggcgggcgcgucuggaccuuccacggcgagacgccccgggccaccaccgacuccagcaacaccgccgaccugaacaacaucagcaucaucauccacuccgaguucuacaucaucccccgcagccaggaguccaagugcaacgaguacaucaacaacgggcugugaggacuaguuauaagacugacuagcccgaugggccucccaacgggcccuccuccccuccuugcaccgagauuaauaaaaaaaaaaaaaaaaaaaaaaaaaaaaaaaaaaaaaaaaaaaaaaaaaaaaaaaaaaaaaaaaaaaaaaaaaaaaaaaaaaaaaaaaaaaaaaaaaaaa

SEQ ID NO: 912 - RNA, 1236 nt, Artificial Sequence; identical to SEQ ID NO: 911
  mRNA product Design i-3 (A100) comprising derived and/or modified sequence from RVA/DS-1/P[4]__ABV53252.1__LumSynt_P2_VP8*(65-223) (opt1)

SEQ ID NO: 913 - RNA, 1236 nt, Artificial Sequence
  mRNA product Design i-3 (A100) comprising derived and/or modified sequence from RVA/F01322/P[6]__AFA51886.1__LumSynt_P2_VP8*(65-223) (opt1)
aggagaaagcuuaccaugcagaucuacgagggcaagcugaccgccgaggggcuccgcuucggcaucguggccagccgguucaaccacgcgcuggucgaccgccugguggagggggccaucgacgccaucgugcggcacggcgggcgcgaggaggacaucacccucguccgggugcccggcuccugggagaucccgguggccgccggcgagcuggcccgcaaggaggacaucgacgcggucaucgccaucggggugcugauccggggcgccacgccccacuucgacuacaucgccagcgagguguccaaggggcucgcggaccugagccuggagcuccgcaagcccaucaccuucggcgucaucaccgccgacacccuggagcaggccaucgagcgggccgggacgaagcacggcaacaagggcugggaggccgcgcuguccgccaucgagauggccaaccucuucaagagccugcgcggcgggagcggcggguccggcgggagcggcggcuccgggggcgggcaguacaucaaggccaacagcaaguucaucggcaucaccgagcugggcagcggguccggccucgacgggcccuaccagccgaccaacuucaagccgcccaacgacuacuggauccugcugaaccccaccaaccagcagguggugcucgagggcacgaacaagaccgacaucugggucgcccugcugcucguggagccgaacgugaccaaccagagccggcaguacacccuguucggggagacgaagcagaucaccgucgagaacaacaccaacaaguggaaguucuucgagauguuccgcuccagcguguccgccgaguuccagcacaagcggacccugacgagcgacaccaagcucgccggcuucaugaaguucuacaacuccguguggaccuuccacggcgagacccccaacgccacgaccgacuacagcuccaccagcaaccuguucgaggucgagaccgugauccacguggaguucuacaucaucccccgcucccaggagagcaagugcuccgaguacaucaacacggggcugugaggacuaguuauaagacugacuagcccgaugggccucccaacgggcccuccuccccuccuugcaccgagauuaauaaaaaaaaaaaaaaaaaaaaaaaaaaaaaaaaaaaaaaaaaaaaaaaaaaaaaaaaaaaaaaaaaaaaaaaaaaaaaaaaaaaaaaaaaaaaaaaaaaaa

SEQ ID NO: 914 - RNA, 1236 nt, Artificial Sequence
  mRNA product Design i-3 (A100) comprising derived and/or modified sequence from RVA/1076/P[6]__AAA47337.1__LumSynt_P2_VP8*(65-223) (opt1)
aggagaaagcuuaccaugcagaucuacgagggcaagcugaccgccgaggggcuccgcuucggcaucguggccagccgguucaaccacgcgcuggucgaccgccugguggagggggccaucgacgccaucgugcggcacggcgggcgcgaggaggacaucacccucguccgggugcccggcuccugggagaucccgguggccgccggcgagcuggcccgcaaggaggacaucgacgcggucaucgccaucggggugcugauccggggcgccacgccccacuucgacuacaucgccagcgagguguccaaggggcucgcggaccugagccuggagcuccgcaagcccaucaccuucggcgucaucaccgccgacacccuggagcaggccaucgagcgggccgggacgaagcacggcaacaagggcugggaggccgcgcuguccgccaucgagauggccaaccucuucaagagccugcgcggcgggagcggcggguccggcgggagcggcggcuccgggggcgggcaguacaucaaggccaacagcaaguucaucggcaucaccgagcugggcagcggguccggccucgacgggcccuaccagccgaccuccuucaagccgcccagcgacuacuggauccugcugaaccccaccaaccagcaggucgugcucgagggcacgaacaagaccgacaucuggguggcccugcugcucguggagcccaacgugaccaaccagucccggcaguacacccuguucggggagacgaagcagaucaccgucgagaacaacaccaacaaguggaaguucuucgagauguuccgcagcuccgugagcgccgaguuccagcacaagcggacccugacguccgacaccaagcucgccggcuuccugaaguucuacaacagcguguggaccuucuacggcgagacgccccacgccaccaccgacuacuccagcaccuccaaccugagcgaggucgagaccgcgauccacguggaguucuacaucaucccccgcucccaggagagcaagugcaacgaguacaucaacacggggcugugaggacuaguuauaagacugacuagcccgaugggccucccaacgggcccuccuccccuccuugcaccgagauuaauaaaaaaaaaaaaaaaaaaaaaaaaaaaaaaaaaaaaaaaaaaaaaaaaaaaaaaaaaaaaaaaaaaaaaaaaaaaaaaaaaaaaaaaaaaaaaaaaaaaa

SEQ ID NO: 915 - RNA, 1236 nt, Artificial Sequence
  mRNA product Design i-3 (A100) comprising derived and/or modified sequence from RVA/BE1128/P[8]__AEX30671.1__LumSynt_P2_VP8*(65-223) (opt1)
aggagaaagcuuaccaugcagaucuacgagggcaagcugaccgccgaggggcuccgcuucggcaucguggccagccgguucaaccacgcgcuggucgaccgccugguggagggggccaucgacgccaucgugcggcacggcgggcgcgaggaggacaucacccucguccgggugcccggcuccugggagaucccgguggccgccggcgagcuggcccgcaaggaggacaucgacgcggucaucgccaucggggugcugauccggggcgccacgccccacuucgacuacaucgccagcgagguguccaaggggcucgcggaccugagccuggagcuccgcaagcccaucaccuucggcgucaucaccgccgacacccuggagcaggccaucgagcgggccgggacgaagcacggcaacaagggcugggaggccgcgcuguccgccaucgagauggccaaccucuucaagagccugcgcggcgggagcggcggguccggcgggagcggcggcuccgggggcgggcaguacaucaaggccaacagcaaguucaucggcaucaccgagcugggcagcggguccggccucgacggcccguaccagccgacgaccuucaccccgcccaccgacuacuggauccugaucacguccaacaccaacggggugguguacgagagcaccaacaacuccgacuucuggaccgccgucaucgccguggagccccacgugaacccggucgaccgccaguacaacguguucggcgagaacaagcaguucaacgugcggaacgacagcgacaaguggaaguuccuggagauguuccgcggcuccagccagaacgacuucuacaaccggcgcacgcucaccuccgacacccggcuggucgggauccugaaguacggcgggcgcguguggaccuuccacggcgagacgccccgggccaccaccgacagcuccaacaccgccaaccucgacgggaucagcaucacgauccacuccgaguucuacaucaucccccgcagccaggaguccaagugcaacgaguacaucaacaacggccugugaggacuaguuauaagacugacuagcccgaugggccucccaacgggcccuccuccccuccuugcaccgagauuaauaaaaaaaaaaaaaaaaaaaaaaaaaaaaaaaaaaaaaaaaaaaaaaaaaaaaaaaaaaaaaaaaaaaaaaaaaaaaaaaaaaaaaaaaaaaaaaaaaaaa

SEQ ID NO: 916 - RNA, 1236 nt, Artificial Sequence
  mRNA product Design i-3 (A100) comprising derived and/or modified sequence from RVA/Wa-VirWa/P[8]__ACR22783.1__LumSynt_P2_VP8*(65-223) (opt1)
aggagaaagcuuaccaugcagaucuacgagggcaagcugaccgccgaggggcuccgcuucggcaucguggccagccgguucaaccacgcgcuggucgaccgccugguggagggggccaucgacgccaucgugcggcacggcgggcgcgaggaggacaucacccucguccgggugcccggcuccugggagaucccgguggccgccggcgagcuggcccgcaaggaggacaucgacgcggucaucgccaucggggugcugauccggggcgccacgccccacuucgacuacaucgccagcgagguguccaaggggcucgcggaccugagccuggagcuccgcaagcccaucaccuucggcgucaucaccgccgacacccuggagcaggccaucgagcgggccgggacgaagcacggcaacaagggcugggaggccgcgcuguccgccaucgagauggccaaccucuucaagagccugcgcggcgggagcggcggguccggcgggagcggcggcuccgggggcgggcaguacaucaaggccaacagcaaguucaucggcaucaccgagcugggcagcggguccggccucgacgggcccuaccagccgacgaccuucaccccgcccaacgacuacuggauccugaucaacagcaacaccaacggcgucguguacgaguccacgaacaacagcgacuucuggaccgccguggucgccaucgagccccacgugaacccgguggaccgccaguacaccaucuucggggaguccaagcaguucaacguccggaacgacagcaacaaguggaaguuccuggagauguuccgcuccagcucccagaacgaguucuacaaccggcgcacccucacgagcgacacccggcuggugggcauccugaaguacggcgggcgcguguggaccuuccacggcgagaccccgcgggccacgaccgacuccagcuccaccgccaaccucaacaacaucagcaucaccauccacuccgaguucuacaucaucccccgcagccaggagagcaagugcaacgaguacaucaacaacgggcugugaggacuaguuauaagacugacuagcccgaugggccucccaacgggcccuccuccccuccuugcaccgagauuaauaaaaaaaaaaaaaaaaaaaaaaaaaaaaaaaaaaaaaaaaaaaaaaaaaaaaaaaaaaaaaaaaaaaaaaaaaaaaaaaaaaaaaaaaaaaaaaaaaaaa

SEQ ID NO: 917 - RNA, 1236 nt, Artificial Sequence
  mRNA product Design i-3 (A100) comprising derived and/or modified sequence from RVA/Wa/P[8]__AAA47290.1__LumSynt_P2_VP8*(65-223) (opt1)
aggagaaagcuuaccaugcagaucuacgagggcaagcugaccgccgaggggcuccgcuucggcaucguggccagccgguucaaccacgcgcuggucgaccgccugguggagggggccaucgacgccaucgugcggcacggcgggcgcgaggaggacaucacccucguccgggugcccggcuccugggagaucccgguggccgccggcgagcuggcccgcaaggaggacaucgacgcggucaucgccaucggggugcugauccggggcgccacgccccacuucgacuacaucgccagcgagguguccaaggggcucgcggaccugagccuggagcuccgcaagcccaucaccuucggcgucaucaccgccgacacccuggagcaggccaucgagcgggccgggacgaagcacggcaacaagggcugggaggccgcgcuguccgccaucgagauggccaaccucuucaagagccugcgcggcgggagcggcggguccggcgggagcggcggcuccgggggcgggcaguacaucaaggccaacagcaaguucaucggcaucaccgagcugggcagcggguccggccucgacgggcccuaccagccgacgaccuucaccccgcccaacgacuacuggauccugaucaacagcaacaccaacggcgucguguacgaguccacgaacaacagcgacuucuggaccgccguggucgccaucgagccccacgugaaccccguggaccgccaguacaccaucuucggggaguccaagcaguucaacgucagcaacgacuccaacaaguggaaguuccuggagauguuccggagcuccagccagaacgaguucuacaaccgccggacccucacguccgacacccgcuucgugggcauccugaaguacggcgggcggguguggaccuuccacggcgagacgccccgcgccaccaccgacagcuccagcaccgccaaccugaacaacaucuccaucaccauccacagcgaguucuacaucaucccccggagccaggaguccaagugcaacgaguacaucaacaacgggcugugaggacuaguuauaagacugacuagcccgaugggccucccaacgggcccuccuccccuccuugcaccgagauuaauaaaaaaaaaaaaaaaaaaaaaaaaaaaaaaaaaaaaaaaaaaaaaaaaaaaaaaaaaaaaaaaaaaaaaaaaaaaaaaaaaaaaaaaaaaaaaaaaaaaa

SEQ ID NO: 918 - RNA, 1236 nt, Artificial Sequence; identical to SEQ ID NO: 917
  mRNA product Design i-3 (A100) comprising derived and/or modified sequence from RVA/Wa/P[8]__AAA66953.1__LumSynt_P2_VP8*(65-223) (opt1)

SEQ ID NO: 919 - RNA, 1308 nt, Artificial Sequence
  mRNA product Design i-3 (A100) comprising derived and/or modified sequence from RVA/BE1058/P[4]__AEX30665.1__LumSynt_P2_VP8*(41-223) (opt1)
aggagaaagcuuaccaugcagaucuacgagggcaagcugaccgccgaggggcuccgcuucggcaucguggccagccgguucaaccacgcgcuggucgaccgccugguggagggggccaucgacgccaucgugcggcacggcgggcgcgaggaggacaucacccucguccgggugcccggcuccugggagaucccgguggccgccggcgagcuggcccgcaaggaggacaucgacgcggucaucgccaucggggugcugauccggggcgccacgccccacuucgacuacaucgccagcgagguguccaaggggcucgcggaccugagccuggagcuccgcaagcccaucaccuucggcgucaucaccgccgacacccuggagcaggccaucgagcgggccgggacgaagcacggcaacaagggcugggaggccgcgcuguccgccaucgagauggccaaccucuucaagagccugcgcggcgggagcggcggguccggcgggagcggcggcuccgggggcgggcaguacaucaaggccaacagcaaguucaucggcaucaccgagcugggcagcggguccggcgcccagacccgguacgcgcccgugaacuggggccacggggagaucaacgacagcaccaccgucgagcccgugcucgacggccccuaccagcccacgaccuucaagccgcccaacgacuacuggcugcugaucuccagcaacaccgacgggguggucuacgaguccaccaacaacagcgacuucuggacggccgugaucgccguggagccccacgucaaccagaccaaccgccaguacgugcuguucggcgagaacaagcaguucaacaucgagaacuccagcgacaaguggaaguucuucgagauguucaagggcaacucccagagcgacuucuccaaccggcgcacccugaccagcuccaaccggcugguggggaugcucaaguacggcgggcgcgucuggacguuccacggcgagaccccgcgggccaccaccgacagcuccagcacggccgaccugaacaacaucuccaucaucauccacagcgaguucuacaucaucccccgcagccaggaguccaagugcaacgaguacaucaacaacgggcugugaggacuaguuauaagacugacuagcccgaugggccucccaacgggcccuccuccccuccuugcaccgagauuaauaaaaaaaaaaaaaaaaaaaaaaaaaaaaaaaaaaaaaaaaaaaaaaaaaaaaaaaaaaaaaaaaaaaaaaaaaaaaaaaaaaaaaaaaaaaaaaaaaaaa

SEQ ID NO: 920 - RNA, 1308 nt, Artificial Sequence
  mRNA product Design i-3 (A100) comprising derived and/or modified sequence from RVA/DS-1/P[4]__CAD62680.1__LumSynt_P2_VP8*(41-223) (opt1)
aggagaaagcuuaccaugcagaucuacgagggcaagcugaccgccgaggggcuccgcuucggcaucguggccagccgguucaaccacgcgcuggucgaccgccugguggagggggccaucgacgccaucgugcggcacggcgggcgcgaggaggacaucacccucguccgggugcccggcuccugggagaucccgguggccgccggcgagcuggcccgcaaggaggacaucgacgcggucaucgccaucggggugcugauccggggcgccacgccccacuucgacuacaucgccagcgagguguccaaggggcucgcggaccugagccuggagcuccgcaagcccaucaccuucggcgucaucaccgccgacacccuggagcaggccaucgagcgggccgggacgaagcacggcaacaagggcugggaggccgcgcuguccgccaucgagauggccaaccucuucaagagccugcgcggcgggagcggcggguccggcgggagcggcggcuccgggggcgggcaguacaucaaggccaacagcaaguucaucggcaucaccgagcugggcagcggguccggcgcccagacccgguacgcgcccgugaacuggggcuccugggagaucaacgacagcaccaccgucgagcccgugcucgacgggcccuaccagccgacgaccuucaagccgcccaacgacuacuggcugcugaucuccagcaacaccaacggcguggucuacgaguccaccaacaacaacgacuucuggacggccgugagcuccguggagccccacgucagccagaccaaccgccaguacauccucuucggggagaacaagcaguucaacguggagaacaacuccgacaaguggaaguucuucgagaccuucaccggcagcucccagggcaacuucagcaaccggcgcacgcugaccuccagcaaccggcugguggggaugcucaaguacggcgggcgcgucuggaccuuccacggcgagacgccccgggccaccaccgacuccagcaacaccgccgaccugaacaacaucagcaucaucauccacuccgaguucuacaucaucccccgcagccaggaguccaagugcaacgaguacaucaacaacgggcugugaggacuaguuauaagacugacuagcccgaugggccucccaacgggcccuccuccccuccuugcaccgagauuaauaaaaaaaaaaaaaaaaaaaaaaaaaaaaaaaaaaaaaaaaaaaaaaaaaaaaaaaaaaaaaaaaaaaaaaaaaaaaaaaaaaaaaaaaaaaaaaaaaaaa

SEQ ID NO: 921 - RNA, 1308 nt, Artificial Sequence; identical to SEQ ID NO: 920
  mRNA product Design i-3 (A100) comprising derived and/or modified sequence from RVA/DS-1/P[4]__ABV53252.1__LumSynt_P2_VP8*(41-223) (opt1)

SEQ ID NO: 922 - RNA, 1308 nt, Artificial Sequence
  mRNA product Design i-3 (A100) comprising derived and/or modified sequence from RVA/F01322/P[6]__AFA51886.1__LumSynt_P2_VP8*(41-223) (opt1)
aggagaaagcuuaccaugcagaucuacgagggcaagcugaccgccgaggggcuccgcuucggcaucguggccagccgguucaaccacgcgcuggucgaccgccugguggagggggccaucgacgccaucgugcggcacggcgggcgcgaggaggacaucacccucguccgggugcccggcuccugggagaucccgguggccgccggcgagcuggcccgcaaggaggacaucgacgcggucaucgccaucggggugcugauccggggcgccacgccccacuucgacuacaucgccagcgagguguccaaggggcucgcggaccugagccuggagcuccgcaagcccaucaccuucggcgucaucaccgccgacacccuggagcaggccaucgagcgggccgggacgaagcacggcaacaagggcugggaggccgcgcuguccgccaucgagauggccaaccucuucaagagccugcgcggcgggagcggcggguccggcgggagcggcggcuccgggggcgggcaguacaucaaggccaacagcaaguucaucggcaucaccgagcugggcagcggguccggcgcccagaccaacuacgcgcccgugaccuggagccacggcgaggugaacgacuccacgaccaucgagcccguccucgacgggcccuaccagccgaccaacuucaagccgcccaacgacuacuggauccugcugaaccccaccaaccagcagguggugcucgagggcacgaacaagaccgacaucugggucgcccugcugcucguggagccgaacgugaccaaccagagccggcaguacacccuguucggggagacgaagcagaucaccgucgagaacaacaccaacaaguggaaguucuucgagauguuccgcuccagcguguccgccgaguuccagcacaagcggacccugacgagcgacaccaagcucgccggcuucaugaaguucuacaacuccguguggaccuuccacggcgagacccccaacgccacgaccgacuacagcuccaccagcaaccuguucgaggucgagaccgugauccacguggaguucuacaucaucccccgcucccaggagagcaagugcuccgaguacaucaacacggggcugugaggacuaguuauaagacugacuagcccgaugggccucccaacgggcccuccuccccuccuugcaccgagauuaauaaaaaaaaaaaaaaaaaaaaaaaaaaaaaaaaaaaaaaaaaaaaaaaaaaaaaaaaaaaaaaaaaaaaaaaaaaaaaaaaaaaaaaaaaaaaaaaaaaaa

SEQ ID NO: 923 - RNA, 1308 nt, Artificial Sequence
  mRNA product Design i-3 (A100) comprising derived and/or modified sequence from RVA/1076/P[6]__AAA47337.1__LumSynt_P2_VP8*(41-223) (opt1)
aggagaaagcuuaccaugcagaucuacgagggcaagcugaccgccgaggggcuccgcuucggcaucguggccagccgguucaaccacgcgcuggucgaccgccugguggagggggccaucgacgccaucgugcggcacggcgggcgcgaggaggacaucacccucguccgggugcccggcuccugggagaucccgguggccgccggcgagcuggcccgcaaggaggacaucgacgcggucaucgccaucggggugcugauccggggcgccacgccccacuucgacuacaucgccagcgagguguccaaggggcucgcggaccugagccuggagcuccgcaagcccaucaccuucggcgucaucaccgccgacacccuggagcaggccaucgagcgggccgggacgaagcacggcaacaagggcugggaggccgcgcuguccgccaucgagauggccaaccucuucaagagccugcgcggcgggagcggcggguccggcgggagcggcggcuccgggggcgggcaguacaucaaggccaacagcaaguucaucggcaucaccgagcugggcagcggguccggcgcccagaccaacuacgcgcccgugaccuggagccacggcgaggugaacgacagcacgaccaucgagcccguccucgacgggcccuaccagccgaccuccuucaagccgcccagcgacuacuggauccugcugaaccccaccaaccagcaggucgugcucgagggcacgaacaagaccgacaucuggguggcccugcugcucguggagcccaacgugaccaaccagucccggcaguacacccuguucggggagacgaagcagaucaccgucgagaacaacaccaacaaguggaaguucuucgagauguuccgcagcuccgugagcgccgaguuccagcacaagcggacccugacguccgacaccaagcucgccggcuuccugaaguucuacaacagcguguggaccuucuacggcgagacgccccacgccaccaccgacuacuccagcaccuccaaccugagcgaggucgagaccgcgauccacguggaguucuacaucaucccccgcucccaggagagcaagugcaacgaguacaucaacacggggcugugaggacuaguuauaagacugacuagcccgaugggccucccaacgggcccuccuccccuccuugcaccgagauuaauaaaaaaaaaaaaaaaaaaaaaaaaaaaaaaaaaaaaaaaaaaaaaaaaaaaaaaaaaaaaaaaaaaaaaaaaaaaaaaaaaaaaaaaaaaaaaaaaaaaa

SEQ ID NO: 924 - RNA, 1308 nt, Artificial Sequence
  mRNA product Design i-3 (A100) comprising derived and/or modified sequence from RVA/BE1128/P[8]__AEX30671.1__LumSynt_P2_VP8*(41-223) (opt1)
aggagaaagcuuaccaugcagaucuacgagggcaagcugaccgccgaggggcuccgcuucggcaucguggccagccgguucaaccacgcgcuggucgaccgccugguggagggggccaucgacgccaucgugcggcacggcgggcgcgaggaggacaucacccucguccgggugcccggcuccugggagaucccgguggccgccggcgagcuggcccgcaaggaggacaucgacgcggucaucgccaucggggugcugauccggggcgccacgccccacuucgacuacaucgccagcgagguguccaaggggcucgcggaccugagccuggagcuccgcaagcccaucaccuucggcgucaucaccgccgacacccuggagcaggccaucgagcgggccgggacgaagcacggcaacaagggcugggaggccgcgcuguccgccaucgagauggccaaccucuucaagagccugcgcggcgggagcggcggguccggcgggagcggcggcuccgggggcgggcaguacaucaaggccaacagcaaguucaucggcaucaccgagcugggcagcggguccggcgcccagacccgguacgcgcccgugaacuggggccacggggagaucaacgacagcaccaccgucgagcccauccucgacggcccguaccagccgacgaccuucaccccgcccaccgacuacuggauccugaucacguccaacaccaacggggugguguacgagagcaccaacaacuccgacuucuggaccgccgucaucgccguggagccccacgugaacccggucgaccgccaguacaacguguucggcgagaacaagcaguucaacgugcggaacgacagcgacaaguggaaguuccuggagauguuccgcggcuccagccagaacgacuucuacaaccggcgcacgcucaccuccgacacccggcuggucgggauccugaaguacggcgggcgcguguggaccuuccacggcgagacgccccgggccaccaccgacagcuccaacaccgccaaccucgacgggaucagcaucacgauccacuccgaguucuacaucaucccccgcagccaggaguccaagugcaacgaguacaucaacaacggccugugaggacuaguuauaagacugacuagcccgaugggccucccaacgggcccuccuccccuccuugcaccgagauuaauaaaaaaaaaaaaaaaaaaaaaaaaaaaaaaaaaaaaaaaaaaaaaaaaaaaaaaaaaaaaaaaaaaaaaaaaaaaaaaaaaaaaaaaaaaaaaaaaaaaa

SEQ ID NO: 925 - RNA, 1308 nt, Artificial Sequence
  mRNA product Design i-3 (A100) comprising derived and/or modified sequence from RVA/Wa-VirWa/P[8]__ACR22783.1__LumSynt_P2_VP8*(41-223) (opt1)
aggagaaagcuuaccaugcagaucuacgagggcaagcugaccgccgaggggcuccgcuucggcaucguggccagccgguucaaccacgcgcuggucgaccgccugguggagggggccaucgacgccaucgugcggcacggcgggcgcgaggaggacaucacccucguccgggugcccggcuccugggagaucccgguggccgccggcgagcuggcccgcaaggaggacaucgacgcggucaucgccaucggggugcugauccggggcgccacgccccacuucgacuacaucgccagcgagguguccaaggggcucgcggaccugagccuggagcuccgcaagcccaucaccuucggcgucaucaccgccgacacccuggagcaggccaucgagcgggccgggacgaagcacggcaacaagggcugggaggccgcgcuguccgccaucgagauggccaaccucuucaagagccugcgcggcgggagcggcggguccggcgggagcggcggcuccgggggcgggcaguacaucaaggccaacagcaaguucaucggcaucaccgagcugggcagcggguccggcgcccagacccgguacgcgcccgugaacugggggcacggcgagaucaacgacuccaccaccguggagcccauccucgacgggcccuaccagccgacgaccuucaccccgcccaacgacuacuggauccugaucaacagcaacaccaacggcgucguguacgaguccacgaacaacagcgacuucuggaccgccguggucgccaucgagccccacgugaacccgguggaccgccaguacaccaucuucggggaguccaagcaguucaacguccggaacgacagcaacaaguggaaguuccuggagauguuccgcuccagcucccagaacgaguucuacaaccggcgcacccucacgagcgacacccggcuggugggcauccugaaguacggcgggcgcguguggaccuuccacggcgagaccccgcgggccacgaccgacuccagcuccaccgccaaccucaacaacaucagcaucaccauccacuccgaguucuacaucaucccccgcagccaggagagcaagugcaacgaguacaucaacaacgggcugugaggacuaguuauaagacugacuagcccgaugggccucccaacgggcccuccuccccuccuugcaccgagauuaauaaaaaaaaaaaaaaaaaaaaaaaaaaaaaaaaaaaaaaaaaaaaaaaaaaaaaaaaaaaaaaaaaaaaaaaaaaaaaaaaaaaaaaaaaaaaaaaaaaaa

SEQ ID NO: 926 - RNA, 1308 nt, Artificial Sequence
  mRNA product Design i-3 (A100) comprising derived and/or modified sequence from RVA/Wa/P[8]__AAA47290.1__LumSynt_P2_VP8*(41-223) (opt1)
aggagaaagcuuaccaugcagaucuacgagggcaagcugaccgccgaggggcuccgcuucggcaucguggccagccgguucaaccacgcgcuggucgaccgccugguggagggggccaucgacgccaucgugcggcacggcgggcgcgaggaggacaucacccucguccgggugcccggcuccugggagaucccgguggccgccggcgagcuggcccgcaaggaggacaucgacgcggucaucgccaucggggugcugauccggggcgccacgccccacuucgacuacaucgccagcgagguguccaaggggcucgcggaccugagccuggagcuccgcaagcccaucaccuucggcgucaucaccgccgacacccuggagcaggccaucgagcgggccgggacgaagcacggcaacaagggcugggaggccgcgcuguccgccaucgagauggccaaccucuucaagagccugcgcggcgggagcggcggguccggcgggagcggcggcuccgggggcgggcaguacaucaaggccaacagcaaguucaucggcaucaccgagcugggcagcggguccggcgcccagacccgguacgcgcccgugaacugggggcacggcgagaucaacgacuccaccaccguggagcccauccucgacgggcccuaccagccgacgaccuucaccccgcccaacgacuacuggauccugaucaacagcaacaccaacggcgucguguacgaguccacgaacaacagcgacuucuggaccgccguggucgccaucgagccccacgugaaccccguggaccgccaguacaccaucuucggggaguccaagcaguucaacgucagcaacgacuccaacaaguggaaguuccuggagauguuccggagcuccagccagaacgaguucuacaaccgccggacccucacguccgacacccgcuucgugggcauccugaaguacggcgggcggguguggaccuuccacggcgagacgccccgcgccaccaccgacagcuccagcaccgccaaccugaacaacaucuccaucaccauccacagcgaguucuacaucaucccccggagccaggaguccaagugcaacgaguacaucaacaacgggcugugaggacuaguuauaagacugacuagcccgaugggccucccaacgggcccuccuccccuccuugcaccgagauuaauaaaaaaaaaaaaaaaaaaaaaaaaaaaaaaaaaaaaaaaaaaaaaaaaaaaaaaaaaaaaaaaaaaaaaaaaaaaaaaaaaaaaaaaaaaaaaaaaaaaa

SEQ ID NO: 927 - RNA, 1308 nt, Artificial Sequence
  mRNA product Design i-3 (A100) comprising derived and/or modified sequence from RVA/Wa/P[8]__AAA66953.1__LumSynt_P2_VP8*(41-223) (opt1)
aggagaaagcuuaccaugcagaucuacgagggcaagcugaccgccgaggggcuccgcuucggcaucguggccagccgguucaaccacgcgcuggucgaccgccugguggagggggccaucgacgccaucgugcggcacggcgggcgcgaggaggacaucacccucguccgggugcccggcuccugggagaucccgguggccgccggcgagcuggcccgcaaggaggacaucgacgcggucaucgccaucggggugcugauccggggcgccacgccccacuucgacuacaucgccagcgagguguccaaggggcucgcggaccugagccuggagcuccgcaagcccaucaccuucggcgucaucaccgccgacacccuggagcaggccaucgagcgggccgggacgaagcacggcaacaagggcugggaggccgcgcuguccgccaucgagauggccaaccucuucaagagccugcgcggcgggagcggcggguccggcgggagcggcggcuccgggggcgggcaguacaucaaggccaacagcaaguucaucggcaucaccgagcugggcagcggguccggcgcccagacccgguacgcgcccgugaacugggggcacggcgagaucaacgacuccaccaccguggagcccaugcucgacgggcccuaccagccgacgaccuucaccccgcccaacgacuacuggauccugaucaacagcaacaccaacggcgucguguacgaguccacgaacaacagcgacuucuggaccgccguggucgccaucgagccccacgugaaccccguggaccgccaguacaccaucuucggggaguccaagcaguucaacgucagcaacgacuccaacaaguggaaguuccuggagauguuccggagcuccagccagaacgaguucuacaaccgccggacccucacguccgacacccgcuucgugggcauccugaaguacggcgggcggguguggaccuuccacggcgagacgccccgcgccaccaccgacagcuccagcaccgccaaccugaacaacaucuccaucaccauccacagcgaguucuacaucaucccccggagccaggaguccaagugcaacgaguacaucaacaacgggcugugaggacuaguuauaagacugacuagcccgaugggccucccaacgggcccuccuccccuccuugcaccgagauuaauaaaaaaaaaaaaaaaaaaaaaaaaaaaaaaaaaaaaaaaaaaaaaaaaaaaaaaaaaaaaaaaaaaaaaaaaaaaaaaaaaaaaaaaaaaaaaaaaaaaa

SEQ ID NO: 928 - RNA, 783 nt, Artificial Sequence
  mRNA product Design i-3 (A100) comprising derived and/or modified sequence from RVA/BE1058/P[4]__AEX30665.1__SP-IgE_P2_VP8*(65-223) (opt1)
aggagaaagcuuaccauggacuggaccuggauccuguuccucguggccgccgcgacccgcguccacagccaguacaucaaggccaacagcaaguucaucggcaucaccgagcugggcagcggguccggccucgacggccccuaccagcccacgaccuucaagccgcccaacgacuacuggcugcugaucuccagcaacaccgacgggguggucuacgaguccaccaacaacagcgacuucuggacggccgugaucgccguggagccccacgucaaccagaccaaccgccaguacgugcuguucggcgagaacaagcaguucaacaucgagaacuccagcgacaaguggaaguucuucgagauguucaagggcaacucccagagcgacuucuccaaccggcgcacccugaccagcuccaaccggcugguggggaugcucaaguacggcgggcgcgucuggacguuccacggcgagaccccgcgggccaccaccgacagcuccagcacggccgaccugaacaacaucuccaucaucauccacagcgaguucuacaucaucccccgcagccaggaguccaagugcaacgaguacaucaacaacgggcugugaggacuaguuauaagacugacuagcccgaugggccucccaacgggcccuccuccccuccuugcaccgagauuaauaaaaaaaaaaaaaaaaaaaaaaaaaaaaaaaaaaaaaaaaaaaaaaaaaaaaaaaaaaaaaaaaaaaaaaaaaaaaaaaaaaaaaaaaaaaaaaaaaaaa

SEQ ID NO: 929 - RNA, 783 nt, Artificial Sequence
  mRNA product Design i-3 (A100) comprising derived and/or modified sequence from RVA/DS-1/P[4]__CAD62680.1__SP-IgE_P2_VP8*(65-223) (opt1)
aggagaaagcuuaccauggacuggaccuggauccuguuccucguggccgccgcgacccgcguccacagccaguacaucaaggccaacagcaaguucaucggcaucaccgagcugggcagcggguccggccucgacgggcccuaccagccgacgaccuucaagccgcccaacgacuacuggcugcugaucuccagcaacaccaacggcguggucuacgaguccaccaacaacaacgacuucuggacggccgugagcuccguggagccccacgucagccagaccaaccgccaguacauccucuucggggagaacaagcaguucaacguggagaacaacuccgacaaguggaaguucuucgagaccuucaccggcagcucccagggcaacuucagcaaccggcgcacgcugaccuccagcaaccggcugguggggaugcucaaguacggcgggcgcgucuggaccuuccacggcgagacgccccgggccaccaccgacuccagcaacaccgccgaccugaacaacaucagcaucaucauccacuccgaguucuacaucaucccccgcagccaggaguccaagugcaacgaguacaucaacaacgggcugugaggacuaguuauaagacugacuagcccgaugggccucccaacgggcccuccuccccuccuugcaccgagauuaauaaaaaaaaaaaaaaaaaaaaaaaaaaaaaaaaaaaaaaaaaaaaaaaaaaaaaaaaaaaaaaaaaaaaaaaaaaaaaaaaaaaaaaaaaaaaaaaaaaaa

SEQ ID NO: 930 - RNA, 783 nt, Artificial Sequence; identical to SEQ ID NO: 929
  mRNA product Design i-3 (A100) comprising derived and/or modified sequence from RVA/DS-1/P[4]__ABV53252.1__SP-IgE_P2_VP8*(65-223) (opt1)

SEQ ID NO: 931 - RNA, 783 nt, Artificial Sequence
  mRNA product Design i-3 (A100) comprising derived and/or modified sequence from RVA/F01322/P[6]__AFA51886.1__SP-IgE_P2_VP8*(65-223) (opt1)
aggagaaagcuuaccauggacuggaccuggauccuguuccucguggccgccgcgacccgcguccacagccaguacaucaaggccaacagcaaguucaucggcaucaccgagcugggcagcggguccggccucgacgggcccuaccagccgaccaacuucaagccgcccaacgacuacuggauccugcugaaccccaccaaccagcagguggugcucgagggcacgaacaagaccgacaucugggucgcccugcugcucguggagccgaacgugaccaaccagagccggcaguacacccuguucggggagacgaagcagaucaccgucgagaacaacaccaacaaguggaaguucuucgagauguuccgcuccagcguguccgccgaguuccagcacaagcggacccugacgagcgacaccaagcucgccggcuucaugaaguucuacaacuccguguggaccuuccacggcgagacccccaacgccacgaccgacuacagcuccaccagcaaccuguucgaggucgagaccgugauccacguggaguucuacaucaucccccgcucccaggagagcaagugcuccgaguacaucaacacggggcugugaggacuaguuauaagacugacuagcccgaugggccucccaacgggcccuccuccccuccuugcaccgagauuaauaaaaaaaaaaaaaaaaaaaaaaaaaaaaaaaaaaaaaaaaaaaaaaaaaaaaaaaaaaaaaaaaaaaaaaaaaaaaaaaaaaaaaaaaaaaaaaaaaaaa

SEQ ID NO: 932 - RNA, 783 nt, Artificial Sequence
  mRNA product Design i-3 (A100) comprising derived and/or modified sequence from RVA/1076/P[6]__AAA47337.1__SP-IgE_P2_VP8*(65-223) (opt1)
aggagaaagcuuaccauggacuggaccuggauccuguuccucguggccgccgcgacccgcguccacagccaguacaucaaggccaacagcaaguucaucggcaucaccgagcugggcagcggguccggccucgacgggcccuaccagccgaccuccuucaagccgcccagcgacuacuggauccugcugaaccccaccaaccagcaggucgugcucgagggcacgaacaagaccgacaucuggguggcccugcugcucguggagcccaacgugaccaaccagucccggcaguacacccuguucggggagacgaagcagaucaccgucgagaacaacaccaacaaguggaaguucuucgagauguuccgcagcuccgugagcgccgaguuccagcacaagcggacccugacguccgacaccaagcucgccggcuuccugaaguucuacaacagcguguggaccuucuacggcgagacgccccacgccaccaccgacuacuccagcaccuccaaccugagcgaggucgagaccgcgauccacguggaguucuacaucaucccccgcucccaggagagcaagugcaacgaguacaucaacacggggcugugaggacuaguuauaagacugacuagcccgaugggccucccaacgggcccuccuccccuccuugcaccgagauuaauaaaaaaaaaaaaaaaaaaaaaaaaaaaaaaaaaaaaaaaaaaaaaaaaaaaaaaaaaaaaaaaaaaaaaaaaaaaaaaaaaaaaaaaaaaaaaaaaaaaa

SEQ ID NO: 933 - RNA, 783 nt, Artificial Sequence
  mRNA product Design i-3 (A100) comprising derived and/or modified sequence from RVA/BE1128/P[8]__AEX30671.1__SP-IgE_P2_VP8*(65-223) (opt1)
aggagaaagcuuaccauggacuggaccuggauccuguuccucguggccgccgcgacccgcguccacagccaguacaucaaggccaacagcaaguucaucggcaucaccgagcugggcagcggguccggccucgacggcccguaccagccgacgaccuucaccccgcccaccgacuacuggauccugaucacguccaacaccaacggggugguguacgagagcaccaacaacuccgacuucuggaccgccgucaucgccguggagccccacgugaacccggucgaccgccaguacaacguguucggcgagaacaagcaguucaacgugcggaacgacagcgacaaguggaaguuccuggagauguuccgcggcuccagccagaacgacuucuacaaccggcgcacgcucaccuccgacacccggcuggucgggauccugaaguacggcgggcgcguguggaccuuccacggcgagacgccccgggccaccaccgacagcuccaacaccgccaaccucgacgggaucagcaucacgauccacuccgaguucuacaucaucccccgcagccaggaguccaagugcaacgaguacaucaacaacggccugugaggacuaguuauaagacugacuagcccgaugggccucccaacgggcccuccuccccuccuugcaccgagauuaauaaaaaaaaaaaaaaaaaaaaaaaaaaaaaaaaaaaaaaaaaaaaaaaaaaaaaaaaaaaaaaaaaaaaaaaaaaaaaaaaaaaaaaaaaaaaaaaaaaaa

SEQ ID NO: 934 - RNA, 783 nt, Artificial Sequence
  mRNA product Design i-3 (A100) comprising derived and/or modified sequence from RVA/Wa-VirWa/P[8]__ACR22783.1__SP-IgE_P2_VP8*(65-223) (opt1)
aggagaaagcuuaccauggacuggaccuggauccuguuccucguggccgccgcgacccgcguccacagccaguacaucaaggccaacagcaaguucaucggcaucaccgagcugggcagcggguccggccucgacgggcccuaccagccgacgaccuucaccccgcccaacgacuacuggauccugaucaacagcaacaccaacggcgucguguacgaguccacgaacaacagcgacuucuggaccgccguggucgccaucgagccccacgugaacccgguggaccgccaguacaccaucuucggggaguccaagcaguucaacguccggaacgacagcaacaaguggaaguuccuggagauguuccgcuccagcucccagaacgaguucuacaaccggcgcacccucacgagcgacacccggcuggugggcauccugaaguacggcgggcgcguguggaccuuccacggcgagaccccgcgggccacgaccgacuccagcuccaccgccaaccucaacaacaucagcaucaccauccacuccgaguucuacaucaucccccgcagccaggagagcaagugcaacgaguacaucaacaacgggcugugaggacuaguuauaagacugacuagcccgaugggccucccaacgggcccuccuccccuccuugcaccgagauuaauaaaaaaaaaaaaaaaaaaaaaaaaaaaaaaaaaaaaaaaaaaaaaaaaaaaaaaaaaaaaaaaaaaaaaaaaaaaaaaaaaaaaaaaaaaaaaaaaaaaa

SEQ ID NO: 935 - RNA, 783 nt, Artificial Sequence
  mRNA product Design i-3 (A100) comprising derived and/or modified sequence from RVA/Wa/P[8]__AAA47290.1__SP-IgE_P2_VP8*(65-223) (opt1)
aggagaaagcuuaccauggacuggaccuggauccuguuccucguggccgccgcgacccgcguccacagccaguacaucaaggccaacagcaaguucaucggcaucaccgagcugggcagcggguccggccucgacgggcccuaccagccgacgaccuucaccccgcccaacgacuacuggauccugaucaacagcaacaccaacggcgucguguacgaguccacgaacaacagcgacuucuggaccgccguggucgccaucgagccccacgugaaccccguggaccgccaguacaccaucuucggggaguccaagcaguucaacgucagcaacgacuccaacaaguggaaguuccuggagauguuccggagcuccagccagaacgaguucuacaaccgccggacccucacguccgacacccgcuucgugggcauccugaaguacggcgggcggguguggaccuuccacggcgagacgccccgcgccaccaccgacagcuccagcaccgccaaccugaacaacaucuccaucaccauccacagcgaguucuacaucaucccccggagccaggaguccaagugcaacgaguacaucaacaacgggcugugaggacuaguuauaagacugacuagcccgaugggccucccaacgggcccuccuccccuccuugcaccgagauuaauaaaaaaaaaaaaaaaaaaaaaaaaaaaaaaaaaaaaaaaaaaaaaaaaaaaaaaaaaaaaaaaaaaaaaaaaaaaaaaaaaaaaaaaaaaaaaaaaaaaa

SEQ ID NO: 936 - RNA, 783 nt, Artificial Sequence; identical to SEQ ID NO: 935
  mRNA product Design i-3 (A100) comprising derived and/or modified sequence from RVA/Wa/P[8]__AAA66953.1__SP-IgE_P2_VP8*(65-223) (opt1)

SEQ ID NO: 937 - RNA, 855 nt, Artificial Sequence
  mRNA product Design i-3 (A100) comprising derived and/or modified sequence from RVA/BE1058/P[4]__AEX30665.1__SP-IgE_P2_VP8*(41-223) (opt1)
aggagaaagcuuaccauggacuggaccuggauccuguuccucguggccgccgcgacccgcguccacagccaguacaucaaggccaacagcaaguucaucggcaucaccgagcugggcagcggguccggcgcccagacccgguacgcgcccgugaacuggggccacggggagaucaacgacagcaccaccgucgagcccgugcucgacggccccuaccagcccacgaccuucaagccgcccaacgacuacuggcugcugaucuccagcaacaccgacgggguggucuacgaguccaccaacaacagcgacuucuggacggccgugaucgccguggagccccacgucaaccagaccaaccgccaguacgugcuguucggcgagaacaagcaguucaacaucgagaacuccagcgacaaguggaaguucuucgagauguucaagggcaacucccagagcgacuucuccaaccggcgcacccugaccagcuccaaccggcugguggggaugcucaaguacggcgggcgcgucuggacguuccacggcgagaccccgcgggccaccaccgacagcuccagcacggccgaccugaacaacaucuccaucaucauccacagcgaguucuacaucaucccccgcagccaggaguccaagugcaacgaguacaucaacaacgggcugugaggacuaguuauaagacugacuagcccgaugggccucccaacgggcccuccuccccuccuugcaccgagauuaauaaaaaaaaaaaaaaaaaaaaaaaaaaaaaaaaaaaaaaaaaaaaaaaaaaaaaaaaaaaaaaaaaaaaaaaaaaaaaaaaaaaaaaaaaaaaaaaaaaaa

SEQ ID NO: 938 - RNA, 855 nt, Artificial Sequence
  mRNA product Design i-3 (A100) comprising derived and/or modified sequence from RVA/DS-1/P[4]__CAD62680.1__SP-IgE_P2_VP8*(41-223) (opt1)
aggagaaagcuuaccauggacuggaccuggauccuguuccucguggccgccgcgacccgcguccacagccaguacaucaaggccaacagcaaguucaucggcaucaccgagcugggcagcggguccggcgcccagacccgguacgcgcccgugaacuggggcuccugggagaucaacgacagcaccaccgucgagcccgugcucgacgggcccuaccagccgacgaccuucaagccgcccaacgacuacuggcugcugaucuccagcaacaccaacggcguggucuacgaguccaccaacaacaacgacuucuggacggccgugagcuccguggagccccacgucagccagaccaaccgccaguacauccucuucggggagaacaagcaguucaacguggagaacaacuccgacaaguggaaguucuucgagaccuucaccggcagcucccagggcaacuucagcaaccggcgcacgcugaccuccagcaaccggcugguggggaugcucaaguacggcgggcgcgucuggaccuuccacggcgagacgccccgggccaccaccgacuccagcaacaccgccgaccugaacaacaucagcaucaucauccacuccgaguucuacaucaucccccgcagccaggaguccaagugcaacgaguacaucaacaacgggcugugaggacuaguuauaagacugacuagcccgaugggccucccaacgggcccuccuccccuccuugcaccgagauuaauaaaaaaaaaaaaaaaaaaaaaaaaaaaaaaaaaaaaaaaaaaaaaaaaaaaaaaaaaaaaaaaaaaaaaaaaaaaaaaaaaaaaaaaaaaaaaaaaaaaa

SEQ ID NO: 939 - RNA, 855 nt, Artificial Sequence; identical to SEQ ID NO: 938
  mRNA product Design i-3 (A100) comprising derived and/or modified sequence from RVA/DS-1/P[4]__ABV53252.1__SP-IgE_P2_VP8*(41-223) (opt1)

SEQ ID NO: 940 - RNA, 855 nt, Artificial Sequence
  mRNA product Design i-3 (A100) comprising derived and/or modified sequence from RVA/F01322/P[6]__AFA51886.1__SP-IgE_P2_VP8*(41-223) (opt1)
aggagaaagcuuaccauggacuggaccuggauccuguuccucguggccgccgcgacccgcguccacagccaguacaucaaggccaacagcaaguucaucggcaucaccgagcugggcagcggguccggcgcccagaccaacuacgcgcccgugaccuggagccacggcgaggugaacgacuccacgaccaucgagcccguccucgacgggcccuaccagccgaccaacuucaagccgcccaacgacuacuggauccugcugaaccccaccaaccagcagguggugcucgagggcacgaacaagaccgacaucugggucgcccugcugcucguggagccgaacgugaccaaccagagccggcaguacacccuguucggggagacgaagcagaucaccgucgagaacaacaccaacaaguggaaguucuucgagauguuccgcuccagcguguccgccgaguuccagcacaagcggacccugacgagcgacaccaagcucgccggcuucaugaaguucuacaacuccguguggaccuuccacggcgagacccccaacgccacgaccgacuacagcuccaccagcaaccuguucgaggucgagaccgugauccacguggaguucuacaucaucccccgcucccaggagagcaagugcuccgaguacaucaacacggggcugugaggacuaguuauaagacugacuagcccgaugggccucccaacgggcccuccuccccuccuugcaccgagauuaauaaaaaaaaaaaaaaaaaaaaaaaaaaaaaaaaaaaaaaaaaaaaaaaaaaaaaaaaaaaaaaaaaaaaaaaaaaaaaaaaaaaaaaaaaaaaaaaaaaaa

SEQ ID NO: 941 - RNA, 855 nt, Artificial Sequence
  mRNA product Design i-3 (A100) comprising derived and/or modified sequence from RVA/1076/P[6]__AAA47337.1__SP-IgE_P2_VP8*(41-223) (opt1)
aggagaaagcuuaccauggacuggaccuggauccuguuccucguggccgccgcgacccgcguccacagccaguacaucaaggccaacagcaaguucaucggcaucaccgagcugggcagcggguccggcgcccagaccaacuacgcgcccgugaccuggagccacggcgaggugaacgacagcacgaccaucgagcccguccucgacgggcccuaccagccgaccuccuucaagccgcccagcgacuacuggauccugcugaaccccaccaaccagcaggucgugcucgagggcacgaacaagaccgacaucuggguggcccugcugcucguggagcccaacgugaccaaccagucccggcaguacacccuguucggggagacgaagcagaucaccgucgagaacaacaccaacaaguggaaguucuucgagauguuccgcagcuccgugagcgccgaguuccagcacaagcggacccugacguccgacaccaagcucgccggcuuccugaaguucuacaacagcguguggaccuucuacggcgagacgccccacgccaccaccgacuacuccagcaccuccaaccugagcgaggucgagaccgcgauccacguggaguucuacaucaucccccgcucccaggagagcaagugcaacgaguacaucaacacggggcugugaggacuaguuauaagacugacuagcccgaugggccucccaacgggcccuccuccccuccuugcaccgagauuaauaaaaaaaaaaaaaaaaaaaaaaaaaaaaaaaaaaaaaaaaaaaaaaaaaaaaaaaaaaaaaaaaaaaaaaaaaaaaaaaaaaaaaaaaaaaaaaaaaaaa

SEQ ID NO: 942 - RNA, 855 nt, Artificial Sequence
  mRNA product Design i-3 (A100) comprising derived and/or modified sequence from RVA/BE1128/P[8]__AEX30671.1__SP-IgE_P2_VP8*(41-223) (opt1)
aggagaaagcuuaccauggacuggaccuggauccuguuccucguggccgccgcgacccgcguccacagccaguacaucaaggccaacagcaaguucaucggcaucaccgagcugggcagcggguccggcgcccagacccgguacgcgcccgugaacuggggccacggggagaucaacgacagcaccaccgucgagcccauccucgacggcccguaccagccgacgaccuucaccccgcccaccgacuacuggauccugaucacguccaacaccaacggggugguguacgagagcaccaacaacuccgacuucuggaccgccgucaucgccguggagccccacgugaacccggucgaccgccaguacaacguguucggcgagaacaagcaguucaacgugcggaacgacagcgacaaguggaaguuccuggagauguuccgcggcuccagccagaacgacuucuacaaccggcgcacgcucaccuccgacacccggcuggucgggauccugaaguacggcgggcgcguguggaccuuccacggcgagacgccccgggccaccaccgacagcuccaacaccgccaaccucgacgggaucagcaucacgauccacuccgaguucuacaucaucccccgcagccaggaguccaagugcaacgaguacaucaacaacggccugugaggacuaguuauaagacugacuagcccgaugggccucccaacgggcccuccuccccuccuugcaccgagauuaauaaaaaaaaaaaaaaaaaaaaaaaaaaaaaaaaaaaaaaaaaaaaaaaaaaaaaaaaaaaaaaaaaaaaaaaaaaaaaaaaaaaaaaaaaaaaaaaaaaaa

SEQ ID NO: 943 - RNA, 855 nt, Artificial Sequence
  mRNA product Design i-3 (A100) comprising derived and/or modified sequence from RVA/Wa-VirWa/P[8]__ACR22783.1__SP-IgE_P2_VP8*(41-223) (opt1)
aggagaaagcuuaccauggacuggaccuggauccuguuccucguggccgccgcgacccgcguccacagccaguacaucaaggccaacagcaaguucaucggcaucaccgagcugggcagcggguccggcgcccagacccgguacgcgcccgugaacugggggcacggcgagaucaacgacuccaccaccguggagcccauccucgacgggcccuaccagccgacgaccuucaccccgcccaacgacuacuggauccugaucaacagcaacaccaacggcgucguguacgaguccacgaacaacagcgacuucuggaccgccguggucgccaucgagccccacgugaacccgguggaccgccaguacaccaucuucggggaguccaagcaguucaacguccggaacgacagcaacaaguggaaguuccuggagauguuccgcuccagcucccagaacgaguucuacaaccggcgcacccucacgagcgacacccggcuggugggcauccugaaguacggcgggcgcguguggaccuuccacggcgagaccccgcgggccacgaccgacuccagcuccaccgccaaccucaacaacaucagcaucaccauccacuccgaguucuacaucaucccccgcagccaggagagcaagugcaacgaguacaucaacaacgggcugugaggacuaguuauaagacugacuagcccgaugggccucccaacgggcccuccuccccuccuugcaccgagauuaauaaaaaaaaaaaaaaaaaaaaaaaaaaaaaaaaaaaaaaaaaaaaaaaaaaaaaaaaaaaaaaaaaaaaaaaaaaaaaaaaaaaaaaaaaaaaaaaaaaaa

SEQ ID NO: 944 - RNA, 855 nt, Artificial Sequence
  mRNA product Design i-3 (A100) comprising derived and/or modified sequence from RVA/Wa/P[8]__AAA47290.1__SP-IgE_P2_VP8*(41-223) (opt1)
aggagaaagcuuaccauggacuggaccuggauccuguuccucguggccgccgcgacccgcguccacagccaguacaucaaggccaacagcaaguucaucggcaucaccgagcugggcagcggguccggcgcccagacccgguacgcgcccgugaacugggggcacggcgagaucaacgacuccaccaccguggagcccauccucgacgggcccuaccagccgacgaccuucaccccgcccaacgacuacuggauccugaucaacagcaacaccaacggcgucguguacgaguccacgaacaacagcgacuucuggaccgccguggucgccaucgagccccacgugaaccccguggaccgccaguacaccaucuucggggaguccaagcaguucaacgucagcaacgacuccaacaaguggaaguuccuggagauguuccggagcuccagccagaacgaguucuacaaccgccggacccucacguccgacacccgcuucgugggcauccugaaguacggcgggcggguguggaccuuccacggcgagacgccccgcgccaccaccgacagcuccagcaccgccaaccugaacaacaucuccaucaccauccacagcgaguucuacaucaucccccggagccaggaguccaagugcaacgaguacaucaacaacgggcugugaggacuaguuauaagacugacuagcccgaugggccucccaacgggcccuccuccccuccuugcaccgagauuaauaaaaaaaaaaaaaaaaaaaaaaaaaaaaaaaaaaaaaaaaaaaaaaaaaaaaaaaaaaaaaaaaaaaaaaaaaaaaaaaaaaaaaaaaaaaaaaaaaaaa

SEQ ID NO: 945 - RNA, 855 nt, Artificial Sequence
  mRNA product Design i-3 (A100) comprising derived and/or modified sequence from RVA/Wa/P[8]__AAA66953.1__SP-IgE_P2_VP8*(41-223) (opt1)
aggagaaagcuuaccauggacuggaccuggauccuguuccucguggccgccgcgacccgcguccacagccaguacaucaaggccaacagcaaguucaucggcaucaccgagcugggcagcggguccggcgcccagacccgguacgcgcccgugaacugggggcacggcgagaucaacgacuccaccaccguggagcccaugcucgacgggcccuaccagccgacgaccuucaccccgcccaacgacuacuggauccugaucaacagcaacaccaacggcgucguguacgaguccacgaacaacagcgacuucuggaccgccguggucgccaucgagccccacgugaaccccguggaccgccaguacaccaucuucggggaguccaagcaguucaacgucagcaacgacuccaacaaguggaaguuccuggagauguuccggagcuccagccagaacgaguucuacaaccgccggacccucacguccgacacccgcuucgugggcauccugaaguacggcgggcggguguggaccuuccacggcgagacgccccgcgccaccaccgacagcuccagcaccgccaaccugaacaacaucuccaucaccauccacagcgaguucuacaucaucccccggagccaggaguccaagugcaacgaguacaucaacaacgggcugugaggacuaguuauaagacugacuagcccgaugggccucccaacgggcccuccuccccuccuugcaccgagauuaauaaaaaaaaaaaaaaaaaaaaaaaaaaaaaaaaaaaaaaaaaaaaaaaaaaaaaaaaaaaaaaaaaaaaaaaaaaaaaaaaaaaaaaaaaaaaaaaaaaaa

SEQ ID NO: 946 - RNA, 732 nt, Artificial Sequence
  mRNA product Design i-3 (A100) comprising derived and/or modified sequence from RVA/BE1058/P[4]__AEX30665.1__P2_VP8*(65-223) (opt1)
aggagaaagcuuaccaugcaguacaucaaggccaacagcaaguucaucggcaucaccgagcugggguccggcagcgggcucgacggccccuaccagccgaccacguucaagccgcccaacgacuacuggcugcugaucuccagcaacaccgacgggguggucuacgaguccaccaacaacagcgacuucuggaccgccgugaucgcgguggagccccacgucaaccagacgaaccgccaguacguccucuucggcgagaacaagcaguucaacaucgagaacuccagcgacaaguggaaguucuucgagauguucaagggcaacucccagagcgacuucuccaaccggcgcacccugaccagcuccaaccggcugguggggaugcucaaguacggcgggcgcguguggaccuuccacggcgagacgccccgggccaccaccgacagcuccagcaccgccgaccugaacaacaucuccaucaucauccacagcgaguucuacaucaucccccgcucccaggagagcaagugcaacgaguacaucaacaacgggcugugaggacuaguuauaagacugacuagcccgaugggccucccaacgggcccuccuccccuccuugcaccgagauuaauaaaaaaaaaaaaaaaaaaaaaaaaaaaaaaaaaaaaaaaaaaaaaaaaaaaaaaaaaaaaaaaaaaaaaaaaaaaaaaaaaaaaaaaaaaaaaaaaaaaa

SEQ ID NO: 947 - RNA, 732 nt, Artificial Sequence
  mRNA product Design i-3 (A100) comprising derived and/or modified sequence from RVA/DS-1/P[4]__CAD62680.1__P2_VP8*(65-223) (opt1)
aggagaaagcuuaccaugcaguacaucaaggccaacagcaaguucaucggcaucaccgagcugggguccggcagcgggcucgacggccccuaccagccgaccacguucaagccgcccaacgacuacuggcugcugaucuccagcaacaccaacgggguggucuacgaguccaccaacaacaacgacuucuggaccgccgugagcuccguggagccccacgucagccagacgaaccgccaguacauccucuucggcgagaacaagcaguucaacguggagaacaacuccgacaaguggaaguucuucgagaccuucaccggcagcucccaggggaacuucagcaaccggcgcacccugacguccagcaaccggcuggugggcaugcucaaguacgggggccgcgucuggaccuuccacggggagacgccccgggcgaccaccgacuccagcaacaccgccgaccugaacaacaucuccaucaucauccacagcgaguucuacaucaucccccgcucccaggagagcaagugcaacgaguacaucaacaacggccugugaggacuaguuauaagacugacuagcccgaugggccucccaacgggcccuccuccccuccuugcaccgagauuaauaaaaaaaaaaaaaaaaaaaaaaaaaaaaaaaaaaaaaaaaaaaaaaaaaaaaaaaaaaaaaaaaaaaaaaaaaaaaaaaaaaaaaaaaaaaaaaaaaaaa

SEQ ID NO: 948 - RNA, 732 nt, Artificial Sequence; identical to SEQ ID NO: 947
  mRNA product Design i-3 (A100) comprising derived and/or modified sequence from RVA/DS-1/P[4]__ABV53252.1__P2_VP8*(65-223) (opt1)

SEQ ID NO: 949 - RNA, 732 nt, Artificial Sequence
  mRNA product Design i-3 (A100) comprising derived and/or modified sequence from RVA/F01322/P[6]__AFA51886.1__P2_VP8*(65-223) (opt1)
aggagaaagcuuaccaugcaguacaucaaggccaacagcaaguucaucggcaucaccgagcugggguccggcagcgggcucgacggccccuaccagccgaccaacuucaagccgcccaacgacuacuggauccugcugaaccccacgaaccagcaggucgugcucgaggggaccaacaagaccgacaucuggguggcccugcugcucguggagcccaacgucaccaaccagucccgccaguacacgcuguucggcgagaccaagcagaucaccguggagaacaacaccaacaaguggaaguucuucgagauguuccggagcuccgugagcgcggaguuccagcacaagcgcacgcugaccuccgacaccaagcucgccggcuucaugaaguucuacaacagcgucuggaccuuccacggggagacgcccaacgccaccaccgacuacuccagcaccuccaaccuguucgagguggagacggugauccacgucgaguucuacaucaucccccggagccaggaguccaagugcagcgaguacaucaacaccggccugugaggacuaguuauaagacugacuagcccgaugggccucccaacgggcccuccuccccuccuugcaccgagauuaauaaaaaaaaaaaaaaaaaaaaaaaaaaaaaaaaaaaaaaaaaaaaaaaaaaaaaaaaaaaaaaaaaaaaaaaaaaaaaaaaaaaaaaaaaaaaaaaaaaaa

SEQ ID NO: 950 - RNA, 732 nt, Artificial Sequence
  mRNA product Design i-3 (A100) comprising derived and/or modified sequence from RVA/1076/P[6]__AAA47337.1__P2_VP8*(65-223) (opt1)
aggagaaagcuuaccaugcaguacaucaaggccaacagcaaguucaucggcaucaccgagcugggguccggcagcgggcucgacggccccuaccagccgaccuccuucaagccgcccagcgacuacuggauccugcugaaccccacgaaccagcaggucgugcucgaggggaccaacaagaccgacaucuggguggcccugcugcucguggagcccaacgucaccaaccagucccgccaguacacgcuguucggcgagaccaagcagaucaccguggagaacaacaccaacaaguggaaguucuucgagauguuccggagcuccgugagcgcggaguuccagcacaagcgcacgcugaccuccgacaccaagcucgccggcuuccugaaguucuacaacagcgucuggaccuucuacggggagacgccccacgccaccaccgacuacuccagcaccuccaaccugagcgagguggagacggccauccacguggaguucuacaucaucccccggucccaggagagcaagugcaacgaguacaucaacaccggccucugaggacuaguuauaagacugacuagcccgaugggccucccaacgggcccuccuccccuccuugcaccgagauuaauaaaaaaaaaaaaaaaaaaaaaaaaaaaaaaaaaaaaaaaaaaaaaaaaaaaaaaaaaaaaaaaaaaaaaaaaaaaaaaaaaaaaaaaaaaaaaaaaaaaa

SEQ ID NO: 951 - RNA, 732 nt, Artificial Sequence
  mRNA product Design i-3 (A100) comprising derived and/or modified sequence from RVA/BE1128/P[8]__AEX30671.1__P2_VP8*(65-223) (opt1)
aggagaaagcuuaccaugcaguacaucaaggccaacagcaaguucaucggcaucaccgagcugggguccggcagcgggcucgacggccccuaccagccgaccacguucaccccgcccaccgacuacuggauccugaucaccuccaacacgaacgggguggucuacgagagcaccaacaacuccgacuucuggaccgccgugaucgcgguggagccccacgucaaccccguggaccgccaguacaacguguucggcgagaacaagcaguucaacguccggaacgacagcgacaaguggaaguuccuggagauguuccgcggcuccagccagaacgacuucuacaaccggcgcacccucacguccgacacccggcugguggggauccugaaguacggcgggcgcguguggaccuuccacggcgagacgccccgggccaccaccgacagcuccaacaccgccaaccucgacgggaucagcaucaccauccacuccgaguucuacaucaucccccgcagccaggaguccaagugcaacgaguacaucaacaacggccugugaggacuaguuauaagacugacuagcccgaugggccucccaacgggcccuccuccccuccuugcaccgagauuaauaaaaaaaaaaaaaaaaaaaaaaaaaaaaaaaaaaaaaaaaaaaaaaaaaaaaaaaaaaaaaaaaaaaaaaaaaaaaaaaaaaaaaaaaaaaaaaaaaaaa

SEQ ID NO: 952 - RNA, 732 nt, Artificial Sequence
  mRNA product Design i-3 (A100) comprising derived and/or modified sequence from RVA/Wa-VirWa/P[8]__ACR22783.1__P2_VP8*(65-223) (opt1)
aggagaaagcuuaccaugcaguacaucaaggccaacagcaaguucaucggcaucaccgagcugggguccggcagcgggcucgacggccccuaccagccgaccacguucaccccgcccaacgacuacuggauccugaucaacuccaacaccaacgggguggucuacgagagcaccaacaacuccgacuucuggacggccgugguggcgaucgagccccacgucaaccccguggaccgccaguacaccaucuucggcgagagcaagcaguucaacgugcggaacgacuccaacaaguggaaguuccuggagauguuccgcagcuccagccagaacgaguucuacaaccggcgcacccucaccuccgacacgcggcuggucggcauccugaaguacgggggccgcguguggaccuuccacggggagacgccccgggccaccaccgacagcuccagcaccgccaaccucaacaacaucuccaucaccauccacagcgaguucuacaucaucccccgcucccaggagagcaagugcaacgaguacaucaacaacggccugugaggacuaguuauaagacugacuagcccgaugggccucccaacgggcccuccuccccuccuugcaccgagauuaauaaaaaaaaaaaaaaaaaaaaaaaaaaaaaaaaaaaaaaaaaaaaaaaaaaaaaaaaaaaaaaaaaaaaaaaaaaaaaaaaaaaaaaaaaaaaaaaaaaaa

SEQ ID NO: 953 - RNA, 732 nt, Artificial Sequence
  mRNA product Design i-3 (A100) comprising derived and/or modified sequence from RVA/Wa/P[8]__AAA47290.1__P2_VP8*(65-223) (opt1)
aggagaaagcuuaccaugcaguacaucaaggccaacagcaaguucaucggcaucaccgagcugggguccggcagcgggcucgacggccccuaccagccgaccacguucaccccgcccaacgacuacuggauccugaucaacuccaacaccaacgggguggucuacgagagcaccaacaacuccgacuucuggacggccgugguggcgaucgagccccacgucaaccccguggaccgccaguacaccaucuucggcgagagcaagcaguucaacguguccaacgacagcaacaaguggaaguuccuggagauguuccgguccagcucccagaacgaguucuacaaccgccggacccucaccagcgacacgcgcuucgucggcauccugaaguacgggggccggguguggaccuuccacggggagacgccccgcgccaccaccgacuccagcuccaccgccaaccugaacaacaucagcaucaccauccacuccgaguucuacaucaucccccggagccaggaguccaagugcaacgaguacaucaacaacggccucugaggacuaguuauaagacugacuagcccgaugggccucccaacgggcccuccuccccuccuugcaccgagauuaauaaaaaaaaaaaaaaaaaaaaaaaaaaaaaaaaaaaaaaaaaaaaaaaaaaaaaaaaaaaaaaaaaaaaaaaaaaaaaaaaaaaaaaaaaaaaaaaaaaaa

SEQ ID NO: 954 - RNA, 732 nt, Artificial Sequence; identical to SEQ ID NO: 953
  mRNA product Design i-3 (A100) comprising derived and/or modified sequence from RVA/Wa/P[8]__AAA66953.1__P2_VP8*(65-223) (opt1)

SEQ ID NO: 955 - RNA, 804 nt, Artificial Sequence
  mRNA product Design i-3 (A100) comprising derived and/or modified sequence from RVA/BE1058/P[4]__AEX30665.1__P2_VP8*(41-223) (opt1)
aggagaaagcuuaccaugcaguacaucaaggccaacagcaaguucaucggcaucaccgagcugggguccggcagcggggcccagacccgcuacgcgcccgugaacuggggccacggggagaucaacgacuccacgaccgucgagccggugcucgacggccccuaccagcccaccaccuucaagcccccgaacgacuacuggcugcugaucagcuccaacacggacggcguggucuacgagagcaccaacaacuccgacuucuggaccgccgugaucgccguggagccccacgucaaccagaccaaccggcaguacguccucuucggggagaacaagcaguucaacaucgagaacagcuccgacaaguggaaguucuucgagauguucaagggcaacagccaguccgacuucagcaaccgccggacgcugaccuccagcaaccgccugguggggaugcucaaguacggcgggcggguguggaccuuccacggcgagacgccccgcgccaccaccgacuccagcuccaccgccgaccugaacaacaucagcaucaucauccacuccgaguucuacaucaucccccggagccaggagagcaagugcaacgaguacaucaacaacggccugugaggacuaguuauaagacugacuagcccgaugggccucccaacgggcccuccuccccuccuugcaccgagauuaauaaaaaaaaaaaaaaaaaaaaaaaaaaaaaaaaaaaaaaaaaaaaaaaaaaaaaaaaaaaaaaaaaaaaaaaaaaaaaaaaaaaaaaaaaaaaaaaaaaaa

SEQ ID NO: 956 - RNA, 804 nt, Artificial Sequence
  mRNA product Design i-3 (A100) comprising derived and/or modified sequence from RVA/DS-1/P[4]__CAD62680.1__P2_VP8*(41-223) (opt1)
aggagaaagcuuaccaugcaguacaucaaggccaacagcaaguucaucggcaucaccgagcugggguccggcagcggggcccagacccgcuacgcgcccgugaacuggggcuccugggagaucaacgacagcacgaccgucgagccggugcucgacgggcccuaccagcccaccaccuucaagcccccgaacgacuacuggcugcugaucuccagcaacacgaacggcguggucuacgaguccaccaacaacaacgacuucuggaccgccgugagcuccguggagccccacgucagccagaccaaccggcaguacauccucuucggcgagaacaagcaguucaacguggagaacaacuccgacaaguggaaguucuucgagacguucaccgggagcucccagggcaacuucagcaaccgccggacccugaccuccagcaaccgccugguggggaugcucaaguacggcgggcgggucuggacguuccacggcgagacgccccgcgccaccaccgacuccagcaacaccgccgaccugaacaacaucuccaucaucauccacagcgaguucuacaucaucccccggagccaggaguccaagugcaacgaguacaucaacaacggccugugaggacuaguuauaagacugacuagcccgaugggccucccaacgggcccuccuccccuccuugcaccgagauuaauaaaaaaaaaaaaaaaaaaaaaaaaaaaaaaaaaaaaaaaaaaaaaaaaaaaaaaaaaaaaaaaaaaaaaaaaaaaaaaaaaaaaaaaaaaaaaaaaaaaa

SEQ ID NO: 957 - RNA, 804 nt, Artificial Sequence; identical to SEQ ID NO: 956
  mRNA product Design i-3 (A100) comprising derived and/or modified sequence from RVA/DS-1/P[4]__ABV53252.1__P2_VP8*(41-223) (opt1)

SEQ ID NO: 958 - RNA, 804 nt, Artificial Sequence
  mRNA product Design i-3 (A100) comprising derived and/or modified sequence from RVA/F01322/P[6]__AFA51886.1__P2_VP8*(41-223) (opt1)
aggagaaagcuuaccaugcaguacaucaaggccaacagcaaguucaucggcaucaccgagcugggguccggcagcggggcccagaccaacuacgcgcccgugacguggucccacggcgaggucaacgacagcaccaccaucgagccggugcucgacgggcccuaccagcccaccaacuucaagcccccgaacgacuacuggauccugcugaaccccacgaaccagcaggucgugcucgagggcaccaacaagaccgacaucuggguggcccugcugcucguggagcccaacgucaccaaccagucccgccaguacacgcuguucggcgagaccaagcagaucaccguggagaacaacaccaacaaguggaaguucuucgagauguuccggagcuccgugagcgccgaguuccagcacaagcgcacgcugaccuccgacaccaagcucgccggguucaugaaguucuacaacagcgucuggaccuuccacggcgagacgcccaacgccaccaccgacuacuccagcaccuccaaccuguucgagguggagacggugauccacgucgaguucuacaucaucccgcggagccaggaguccaagugcagcgaguacaucaacaccgggcugugaggacuaguuauaagacugacuagcccgaugggccucccaacgggcccuccuccccuccuugcaccgagauuaauaaaaaaaaaaaaaaaaaaaaaaaaaaaaaaaaaaaaaaaaaaaaaaaaaaaaaaaaaaaaaaaaaaaaaaaaaaaaaaaaaaaaaaaaaaaaaaaaaaaa

SEQ ID NO: 959 - RNA, 804 nt, Artificial Sequence
  mRNA product Design i-3 (A100) comprising derived and/or modified sequence from RVA/1076/P[6]__AAA47337.1__P2_VP8*(41-223) (opt1)
aggagaaagcuuaccaugcaguacaucaaggccaacagcaaguucaucggcaucaccgagcugggguccggcagcggggcccagaccaacuacgcgcccgugacguggucccacggcgaggucaacgacagcaccaccaucgagccggugcucgacgggcccuaccagcccaccuccuucaagcccccgagcgacuacuggauccugcugaaccccacgaaccagcaggucgugcucgagggcaccaacaagaccgacaucuggguggcccugcugcucguggagcccaacgucaccaaccagucccgccaguacacgcuguucggcgagaccaagcagaucaccguggagaacaacaccaacaaguggaaguucuucgagauguuccggagcuccgugagcgccgaguuccagcacaagcgcacgcugaccuccgacaccaagcucgccggguuccugaaguucuacaacagcgucuggaccuucuacggcgagacgccccacgccaccaccgacuacuccagcaccuccaaccugagcgagguggagacggcgauccacguggaguucuacaucaucccgcggucccaggagagcaagugcaacgaguacaucaacaccgggcucugaggacuaguuauaagacugacuagcccgaugggccucccaacgggcccuccuccccuccuugcaccgagauuaauaaaaaaaaaaaaaaaaaaaaaaaaaaaaaaaaaaaaaaaaaaaaaaaaaaaaaaaaaaaaaaaaaaaaaaaaaaaaaaaaaaaaaaaaaaaaaaaaaaaa

SEQ ID NO: 960 - RNA, 804 nt, Artificial Sequence
  mRNA product Design i-3 (A100) comprising derived and/or modified sequence from RVA/BE1128/P[8]__AEX30671.1__P2_VP8*(41-223) (opt1)
aggagaaagcuuaccaugcaguacaucaaggccaacagcaaguucaucggcaucaccgagcugggguccggcagcggggcccagacccgcuacgcgcccgugaacuggggccacggggagaucaacgacuccacgaccgucgagccgauccucgacggccccuaccagcccaccaccuucacgcccccgaccgacuacuggauccugaucaccagcaacaccaacggcgugguguacgaguccacgaacaacagcgacuucuggaccgccgucaucgccguggagccccacgugaaccccgucgaccggcaguacaacguguucggggagaacaagcaguucaacgugcgcaacgacuccgacaaguggaaguuccuggagauguuccggggcagcucccagaacgacuucuacaaccgccggacccucaccagcgacacgcgccuggucgggauccugaaguacggcgggcggguguggaccuuccacggcgagacgccccgcgccaccaccgacuccagcaacaccgccaaccucgacggcaucuccaucaccauccacagcgaguucuacaucaucccgcggucccaggagagcaagugcaacgaguacaucaacaacgggcugugaggacuaguuauaagacugacuagcccgaugggccucccaacgggcccuccuccccuccuugcaccgagauuaauaaaaaaaaaaaaaaaaaaaaaaaaaaaaaaaaaaaaaaaaaaaaaaaaaaaaaaaaaaaaaaaaaaaaaaaaaaaaaaaaaaaaaaaaaaaaaaaaaaaa

SEQ ID NO: 961 - RNA, 804 nt, Artificial Sequence
  mRNA product Design i-3 (A100) comprising derived and/or modified sequence from RVA/Wa-VirWa/P[8]__ACR22783.1__P2_VP8*(41-223) (opt1)
aggagaaagcuuaccaugcaguacaucaaggccaacagcaaguucaucggcaucaccgagcugggguccggcagcggggcccagacccgcuacgcgcccgugaacuggggccacggggagaucaacgacuccacgaccgucgagccgauccucgacggccccuaccagcccaccaccuucacgcccccgaacgacuacuggauccugaucaacagcaacaccaacggcgugguguacgaguccaccaacaacagcgacuucuggaccgccgucguggccaucgagccccacgugaaccccgucgaccggcaguacacgaucuucggggaguccaagcaguucaacgugcgcaacgacagcaacaaguggaaguuccuggagauguuccgguccagcucccagaacgaguucuacaaccgccggacccucaccagcgacacccgccuggugggcauccugaaguacgggggccgggucuggacguuccacggggagacgccccgcgccaccaccgacuccagcuccaccgccaaccucaacaacaucagcaucaccauccacuccgaguucuacaucaucccgcggagccaggaguccaagugcaacgaguacaucaacaacggccugugaggacuaguuauaagacugacuagcccgaugggccucccaacgggcccuccuccccuccuugcaccgagauuaauaaaaaaaaaaaaaaaaaaaaaaaaaaaaaaaaaaaaaaaaaaaaaaaaaaaaaaaaaaaaaaaaaaaaaaaaaaaaaaaaaaaaaaaaaaaaaaaaaaaa

SEQ ID NO: 962 - RNA, 804 nt, Artificial Sequence
  mRNA product Design i-3 (A100) comprising derived and/or modified sequence from RVA/Wa/P[8]__AAA47290.1__P2_VP8*(41-223) (opt1)
aggagaaagcuuaccaugcaguacaucaaggccaacagcaaguucaucggcaucaccgagcugggguccggcagcggggcccagacccgcuacgcgcccgugaacuggggccacggggagaucaacgacuccacgaccgucgagccgauccucgacggccccuaccagcccaccaccuucacgcccccgaacgacuacuggauccugaucaacagcaacaccaacggcgugguguacgaguccaccaacaacagcgacuucuggaccgccgucguggccaucgagccccacgugaaccccgucgaccggcaguacacgaucuucggggaguccaagcaguucaacgugagcaacgacuccaacaaguggaaguuccuggagauguuccgcagcuccagccagaacgaguucuacaaccggcgcacccucaccuccgacacccgguucgugggcauccugaaguacgggggccgcgucuggacguuccacggggagacgccccgggccaccaccgacagcuccagcaccgccaaccugaacaacaucuccaucaccauccacagcgaguucuacaucaucccgcgcucccaggagagcaagugcaacgaguacaucaacaacggccucugaggacuaguuauaagacugacuagcccgaugggccucccaacgggcccuccuccccuccuugcaccgagauuaauaaaaaaaaaaaaaaaaaaaaaaaaaaaaaaaaaaaaaaaaaaaaaaaaaaaaaaaaaaaaaaaaaaaaaaaaaaaaaaaaaaaaaaaaaaaaaaaaaaaa

SEQ ID NO: 963 - RNA, 804 nt, Artificial Sequence
  mRNA product Design i-3 (A100) comprising derived and/or modified sequence from RVA/Wa/P[8]__AAA66953.1__P2_VP8*(41-223) (opt1)
aggagaaagcuuaccaugcaguacaucaaggccaacagcaaguucaucggcaucaccgagcugggguccggcagcggggcccagacccgcuacgcgcccgugaacuggggccacggggagaucaacgacuccacgaccgucgagccgaugcucgacggccccuaccagcccaccaccuucacgcccccgaacgacuacuggauccugaucaacagcaacaccaacggcgugguguacgaguccaccaacaacagcgacuucuggaccgccgucguggccaucgagccccacgugaaccccgucgaccggcaguacacgaucuucggggaguccaagcaguucaacgugagcaacgacuccaacaaguggaaguuccuggagauguuccgcagcuccagccagaacgaguucuacaaccggcgcacccucaccuccgacacccgguucgugggcauccugaaguacgggggccgcgucuggacguuccacggggagacgccccgggccaccaccgacagcuccagcaccgccaaccugaacaacaucuccaucaccauccacagcgaguucuacaucaucccgcgcucccaggagagcaagugcaacgaguacaucaacaacggccucugaggacuaguuauaagacugacuagcccgaugggccucccaacgggcccuccuccccuccuugcaccgagauuaauaaaaaaaaaaaaaaaaaaaaaaaaaaaaaaaaaaaaaaaaaaaaaaaaaaaaaaaaaaaaaaaaaaaaaaaaaaaaaaaaaaaaaaaaaaaaaaaaaaaa

SEQ ID NO: 964 - RNA, 1230 nt, Artificial Sequence
  mRNA product Design i-3 (A100) comprising derived and/or modified sequence from RVA/BE1058/P[4]__AEX30665.1__P2_VP8*(65-223)_Ferritin (opt1)
aggagaaagcuuaccaugcaguacaucaaggccaacagcaaguucaucggcaucaccgagcugggguccggcagcgggcucgacggccccuaccagccgaccacguucaagccgcccaacgacuacuggcugcugaucuccagcaacaccgacgggguggucuacgaguccaccaacaacagcgacuucuggaccgccgugaucgcgguggagccccacgucaaccagacgaaccgccaguacguccucuucggcgagaacaagcaguucaacaucgagaacuccagcgacaaguggaaguucuucgagauguucaagggcaacucccagagcgacuucuccaaccggcgcacccugaccagcuccaaccggcugguggggaugcucaaguacggcgggcgcguguggaccuuccacggcgagacgccccgggccaccaccgacagcuccagcaccgccgaccugaacaacaucuccaucaucauccacagcgaguucuacaucaucccccgcucccaggagagcaagugcaacgaguacaucaacaacgggcugagcggcggcgacaucaucaagcuccugaacgagcaggucaacaaggagaugcaguccagcaaccuguacauguccaugagcuccuggugcuacacgcacagccucgacggggccggccuguuccuguucgaccacgccgcggaggaguacgagcacgccaagaagcucaucaucuuccugaacgagaacaacgugcccgugcagcugaccuccaucagcgcccccgagcacaaguucgaggggcucacccagaucuuccagaaggccuacgagcacgagcagcacaucuccgagagcaucaacaacaucguggaccacgcgaucaaguccaaggaccacgccaccuucaacuuccugcagugguacguggccgagcagcacgaggaggagguccuguucaaggacauccucgacaagaucgagcugaucggcaacgagaaccacggccuguaccucgccgaccaguacgugaaggggaucgccaagagccggaaguccugaggacuaguuauaagacugacuagcccgaugggccucccaacgggcccuccuccccuccuugcaccgagauuaauaaaaaaaaaaaaaaaaaaaaaaaaaaaaaaaaaaaaaaaaaaaaaaaaaaaaaaaaaaaaaaaaaaaaaaaaaaaaaaaaaaaaaaaaaaaaaaaaaaaa

SEQ ID NO: 965 - RNA, 1230 nt, Artificial Sequence
  mRNA product Design i-3 (A100) comprising derived and/or modified sequence from RVA/DS-1/P[4]__CAD62680.1__P2_VP8*(65-223)_Ferritin (opt1)
aggagaaagcuuaccaugcaguacaucaaggccaacagcaaguucaucggcaucaccgagcugggguccggcagcgggcucgacggccccuaccagccgaccacguucaagccgcccaacgacuacuggcugcugaucuccagcaacaccaacgggguggucuacgaguccaccaacaacaacgacuucuggaccgccgugagcuccguggagccccacgucagccagacgaaccgccaguacauccucuucggcgagaacaagcaguucaacguggagaacaacuccgacaaguggaaguucuucgagaccuucaccggcagcucccaggggaacuucagcaaccggcgcacccugacguccagcaaccggcuggugggcaugcucaaguacgggggccgcgucuggaccuuccacggggagacgccccgggcgaccaccgacuccagcaacaccgccgaccugaacaacaucuccaucaucauccacagcgaguucuacaucaucccccgcucccaggagagcaagugcaacgaguacaucaacaacggccugagcggcggggacaucaucaagcuccugaacgagcaggucaacaaggagaugcaguccagcaaccuguacauguccaugagcuccuggugcuacacccacagccucgacggcgccgggcuguuccuguucgaccacgccgccgaggaguacgagcacgcgaagaagcucaucaucuuccugaacgagaacaacgugcccgugcagcugaccuccaucagcgcccccgagcacaaguucgagggccucacgcagaucuuccagaaggccuacgagcacgagcagcacaucuccgagagcaucaacaacaucguggaccacgccaucaaguccaaggaccacgcgaccuucaacuuccugcagugguacguggccgagcagcacgaggaggagguccuguucaaggacauccucgacaagaucgagcugaucggcaacgagaaccacgggcuguaccucgccgaccaguacgugaagggcaucgccaagagccggaaguccugaggacuaguuauaagacugacuagcccgaugggccucccaacgggcccuccuccccuccuugcaccgagauuaauaaaaaaaaaaaaaaaaaaaaaaaaaaaaaaaaaaaaaaaaaaaaaaaaaaaaaaaaaaaaaaaaaaaaaaaaaaaaaaaaaaaaaaaaaaaaaaaaaaaa

SEQ ID NO: 966 - RNA, 1230 nt, Artificial Sequence; identical to SEQ ID NO: 965
  mRNA product Design i-3 (A100) comprising derived and/or modified sequence from RVA/DS-1/P[4]__ABV53252.1__P2_VP8*(65-223)_Ferritin (opt1)

SEQ ID NO: 967 - RNA, 1230 nt, Artificial Sequence
  mRNA product Design i-3 (A100) comprising derived and/or modified sequence from RVA/F01322/P[6]__AFA51886.1__P2_VP8*(65-223)_Ferritin (opt1)
aggagaaagcuuaccaugcaguacaucaaggccaacagcaaguucaucggcaucaccgagcugggguccggcagcgggcucgacggccccuaccagccgaccaacuucaagccgcccaacgacuacuggauccugcugaaccccacgaaccagcaggucgugcucgaggggaccaacaagaccgacaucuggguggcccugcugcucguggagcccaacgucaccaaccagucccgccaguacacgcuguucggcgagaccaagcagaucaccguggagaacaacaccaacaaguggaaguucuucgagauguuccggagcuccgugagcgcggaguuccagcacaagcgcacgcugaccuccgacaccaagcucgccggcuucaugaaguucuacaacagcgucuggaccuuccacggggagacgcccaacgccaccaccgacuacuccagcaccuccaaccuguucgagguggagacggugauccacgucgaguucuacaucaucccccggagccaggaguccaagugcagcgaguacaucaacaccggccuguccgggggcgacaucaucaagcuccugaacgagcaggucaacaaggagaugcagagcuccaaccuguacaugagcauguccagcuggugcuacacccacagccucgacggggccggccuguuccuguucgaccacgccgcggaggaguacgagcacgccaagaagcucaucaucuuccugaacgagaacaacgugcccgugcagcugaccuccaucagcgccccggagcacaaguucgagggccucacgcagaucuuccagaaggccuacgagcacgagcagcacaucuccgagagcaucaacaacaucguggaccacgcgaucaaguccaaggaccacgccaccuucaacuuccugcagugguacguggccgagcagcacgaggaggagguccuguucaaggacauccucgacaagaucgagcugaucgggaacgagaaccacggccuguaccucgccgaccaguacgugaaggggaucgccaagagccgcaaguccugaggacuaguuauaagacugacuagcccgaugggccucccaacgggcccuccuccccuccuugcaccgagauuaauaaaaaaaaaaaaaaaaaaaaaaaaaaaaaaaaaaaaaaaaaaaaaaaaaaaaaaaaaaaaaaaaaaaaaaaaaaaaaaaaaaaaaaaaaaaaaaaaaaaa

SEQ ID NO: 968 - RNA, 1230 nt, Artificial Sequence
  mRNA product Design i-3 (A100) comprising derived and/or modified sequence from RVA/1076/P[6]__AAA47337.1__P2_VP8*(65-223)_Ferritin (opt1)
aggagaaagcuuaccaugcaguacaucaaggcgaacagcaaguucaucggcaucaccgagcugggguccggcagcgggcucgacggccccuaccagccgaccuccuucaagccgcccagcgacuacuggauccugcugaaccccacgaaccagcaggucgugcucgaggggaccaacaagaccgacaucuggguggcccugcugcucguggagcccaacgucaccaaccagucccgccaguacacgcuguucggcgagaccaagcagaucaccguggagaacaacaccaacaaguggaaguucuucgagauguuccggagcuccgugagcgcggaguuccagcacaagcgcacgcugaccuccgacaccaagcucgccggcuuccugaaguucuacaacagcgucuggaccuucuacggggagacgccccacgccaccaccgacuacuccagcaccuccaaccugagcgagguggagacggccauccacguggaguucuacaucaucccccggucccaggagagcaagugcaacgaguacaucaacaccggccucuccgggggcgacaucaucaagcugcugaacgagcaggucaacaaggagaugcagagcuccaaccucuacaugagcaugagcuccuggugcuacacccacagccuggacggggccggccuguuccucuucgaccacgcggccgaggaguacgagcacgccaagaagcugaucaucuuccugaacgagaacaacgugcccgugcagcucaccuccaucagcgccccggagcacaaguucgagggccugacgcagaucuuccagaaggcguacgagcacgagcagcacaucuccgagagcaucaacaacaucgucgaccacgccaucaaguccaaggaccacgccaccuucaacuuccugcagugguacguggccgagcagcacgaggaggagguccucuucaaggacauccuggacaagaucgagcugaucgggaacgagaaccacggccucuaccuggccgaccaguacgugaaggggaucgccaagagccgcaaguccugaggacuaguuauaagacugacuagcccgaugggccucccaacgggcccuccuccccuccuugcaccgagauuaauaaaaaaaaaaaaaaaaaaaaaaaaaaaaaaaaaaaaaaaaaaaaaaaaaaaaaaaaaaaaaaaaaaaaaaaaaaaaaaaaaaaaaaaaaaaaaaaaaaaa

SEQ ID NO: 969 - RNA, 1230 nt, Artificial Sequence
  mRNA product Design i-3 (A100) comprising derived and/or modified sequence from RVA/BE1128/P[8]__AEX30671.1__P2_VP8*(65-223)_Ferritin (opt1)
aggagaaagcuuaccaugcaguacaucaaggccaacagcaaguucaucggcaucaccgagcugggguccggcagcgggcucgacggccccuaccagccgaccacguucaccccgcccaccgacuacuggauccugaucaccuccaacacgaacgggguggucuacgagagcaccaacaacuccgacuucuggaccgccgugaucgcgguggagccccacgucaaccccguggaccggcaguacaacguguucggcgagaacaagcaguucaacguccggaacgacagcgacaaguggaaguuccuggagauguuccgcggcuccagccagaacgacuucuacaaccggcgcacccucacguccgacacccggcugguggggauccugaaguacggcgggcgcguguggaccuuccacggcgagacgccccgggccaccaccgacagcuccaacaccgccaaccucgacgggaucagcaucaccauccacuccgaguucuacaucaucccccgcagccaggaguccaagugcaacgaguacaucaacaacggccugagcggcggggacaucaucaagcugcucaacgagcaggucaacaaggagaugcaguccagcaaccuguacauguccaugagcagcuggugcuacacgcacucccuggacggcgccggccucuuccuguucgaccacgccgcggaggaguacgagcacgccaagaagcugaucaucuuccucaacgagaacaacgugcccgugcagcugaccagcaucuccgccccggagcacaaguucgaggggcugacccagaucuuccagaaggccuacgagcacgagcagcacaucagcgaguccaucaacaacaucgucgaccacgcgaucaagagcaaggaccacgccaccuucaacuuccuccagugguacguggccgagcagcacgaggaggaggugcuguucaaggacauccuggacaagaucgagcucaucggcaacgagaaccacgggcuguaccuggccgaccaguacgucaagggcaucgccaagucccgcaagagcugaggacuaguuauaagacugacuagcccgaugggccucccaacgggcccuccuccccuccuugcaccgagauuaauaaaaaaaaaaaaaaaaaaaaaaaaaaaaaaaaaaaaaaaaaaaaaaaaaaaaaaaaaaaaaaaaaaaaaaaaaaaaaaaaaaaaaaaaaaaaaaaaaaaa

SEQ ID NO: 970 - RNA, 1230 nt, Artificial Sequence
  mRNA product Design i-3 (A100) comprising derived and/or modified sequence from RVA/Wa-VirWa/P[8]__ACR22783.1__P2_VP8*(65-223)_Ferritin (opt1)
aggagaaagcuuaccaugcaguacaucaaggccaacagcaaguucaucggcaucaccgagcugggguccggcagcgggcucgacggccccuaccagccgaccacguucaccccgcccaacgacuacuggauccugaucaacuccaacaccaacgggguggucuacgagagcaccaacaacuccgacuucuggacggccgugguggcgaucgagccccacgucaaccccguggaccgccaguacaccaucuucggcgagagcaagcaguucaacgugcggaacgacuccaacaaguggaaguuccuggagauguuccgcagcuccagccagaacgaguucuacaaccggcgcacccucaccuccgacacgcggcuggucggcauccugaaguacgggggccgcguguggaccuuccacggggagacgccccgggccaccaccgacagcuccagcaccgccaaccucaacaacaucuccaucaccauccacagcgaguucuacaucaucccccgcucccaggagagcaagugcaacgaguacaucaacaacggccuguccgggggcgacaucaucaagcugcucaacgagcaggucaacaaggagaugcagagcagcaaccuguacauguccaugagcuccuggugcuacacccacagccuggacggcgccggccucuuccuguucgaccacgccgcggaggaguacgagcacgccaagaagcugaucaucuuccucaacgagaacaacgugcccgugcagcugacguccaucagcgccccggagcacaaguucgaggggcugacccagaucuuccagaaggccuacgagcacgagcagcacaucuccgagagcaucaacaacaucguggaccacgcgaucaaguccaaggaccacgccaccuucaacuuccuccagugguacgucgccgagcagcacgaggaggaggugcuguucaaggacauccuggacaagaucgagcucaucgggaacgagaaccacggccuguaccuggccgaccaguacgugaagggcaucgccaagagccggaaguccugaggacuaguuauaagacugacuagcccgaugggccucccaacgggcccuccuccccuccuugcaccgagauuaauaaaaaaaaaaaaaaaaaaaaaaaaaaaaaaaaaaaaaaaaaaaaaaaaaaaaaaaaaaaaaaaaaaaaaaaaaaaaaaaaaaaaaaaaaaaaaaaaaaaa

SEQ ID NO: 971 - RNA, 1230 nt, Artificial Sequence
  mRNA product Design i-3 (A100) comprising derived and/or modified sequence from RVA/Wa/P[8]__AAA47290.1__P2_VP8*(65-223)_Ferritin (opt1)
aggagaaagcuuaccaugcaguacaucaaggccaacagcaaguucaucggcaucaccgagcugggguccggcagcgggcucgacggccccuaccagccgaccacguucaccccgcccaacgacuacuggauccugaucaacuccaacaccaacggggugguguacgagagcaccaacaacuccgacuucuggacggccgugguggcgaucgagccccacgucaaccccguggaccgccaguacaccaucuucggcgagagcaagcaguucaacguguccaacgacagcaacaaguggaaguuccuggagauguuccgguccagcucccagaacgaguucuacaaccgccggacccucaccagcgacacgcgcuucgucggcauccugaaguacgggggccggguguggaccuuccacggggagacgccccgcgccaccaccgacuccagcuccaccgccaaccugaacaacaucagcaucaccauccacuccgaguucuacaucaucccccggagccaggaguccaagugcaacgaguacaucaacaacggccucagcgggggcgacaucaucaagcugcugaacgagcaggucaacaaggagaugcagagcuccaaccucuacaugagcauguccagcuggugcuacacccacucccuggacggcgccgggcuguuccucuucgaccacgccgcggaggaguacgagcacgccaagaagcugaucaucuuccugaacgagaacaacgugcccgugcagcucacgagcaucuccgccccggagcacaaguucgagggccugacccagaucuuccagaaggccuacgagcacgagcagcacaucagcgaguccaucaacaacaucguggaccacgcgaucaagagcaaggaccacgccaccuucaacuuccugcagugguacgucgccgagcagcacgaggaggagguccucuucaaggacauccuggacaagaucgagcugaucgggaacgagaaccacggccucuaccuggccgaccaguacgugaagggcaucgccaagucccgcaagagcugaggacuaguuauaagacugacuagcccgaugggccucccaacgggcccuccuccccuccuugcaccgagauuaauaaaaaaaaaaaaaaaaaaaaaaaaaaaaaaaaaaaaaaaaaaaaaaaaaaaaaaaaaaaaaaaaaaaaaaaaaaaaaaaaaaaaaaaaaaaaaaaaaaaa

SEQ ID NO: 972 - RNA, 1230 nt, Artificial Sequence; identical to SEQ ID NO: 971
  mRNA product Design i-3 (A100) comprising derived and/or modified sequence from RVA/Wa/P[8]__AAA66953.1__P2_VP8*(65-223)_Ferritin (opt1)

SEQ ID NO: 973 - RNA, 1302 nt, Artificial Sequence
  mRNA product Design i-3 (A100) comprising derived and/or modified sequence from RVA/BE1058/P[4]__AEX30665.1__P2_VP8*(41-223)_Ferritin (opt1)
aggagaaagcuuaccaugcaguacaucaaggccaacagcaaguucaucggcaucaccgagcugggguccggcagcggggcccagacccgcuacgcgcccgugaacuggggccacggggagaucaacgacuccacgaccgucgagccggugcucgacggccccuaccagcccaccaccuucaagcccccgaacgacuacuggcugcugaucagcuccaacacggacggcguggucuacgagagcaccaacaacuccgacuucuggaccgccgugaucgccguggagccccacgucaaccagaccaaccggcaguacguccucuucggggagaacaagcaguucaacaucgagaacagcuccgacaaguggaaguucuucgagauguucaagggcaacagccaguccgacuucagcaaccgccggacgcugaccuccagcaaccgccugguggggaugcucaaguacggcgggcggguguggaccuuccacggcgagacgccccgcgccaccaccgacuccagcuccaccgccgaccugaacaacaucagcaucaucauccacuccgaguucuacaucaucccccggagccaggagagcaagugcaacgaguacaucaacaacggccuguccgggggcgacaucaucaagcuccugaacgagcaggucaacaaggagaugcagagcuccaaccuguacaugagcauguccagcuggugcuacacccacucccucgacggggcgggccuguuccuguucgaccacgccgccgaggaguacgagcacgccaagaagcucaucaucuuccugaacgagaacaacgugccggugcagcugacgagcaucuccgcgcccgagcacaaguucgagggccucacccagaucuuccagaaggccuacgagcacgagcagcacaucagcgaguccaucaacaacaucguggaccacgccaucaagagcaaggaccacgccaccuucaacuuccugcagugguacguggccgagcagcacgaggaggagguccuguucaaggacauccucgacaagaucgagcugaucgggaacgagaaccacggccuguaccucgcggaccaguacgugaaggggaucgccaagucccgcaagagcugaggacuaguuauaagacugacuagcccgaugggccucccaacgggcccuccuccccuccuugcaccgagauuaauaaaaaaaaaaaaaaaaaaaaaaaaaaaaaaaaaaaaaaaaaaaaaaaaaaaaaaaaaaaaaaaaaaaaaaaaaaaaaaaaaaaaaaaaaaaaaaaaaaaa

SEQ ID NO: 974 - RNA, 1302 nt, Artificial Sequence
  mRNA product Design i-3 (A100) comprising derived and/or modified sequence from RVA/DS-1/P[4]__CAD62680.1__P2_VP8*(41-223)_Ferritin (opt1)
aggagaaagcuuaccaugcaguacaucaaggcgaacagcaaguucaucggcaucaccgagcugggguccggcagcggggcccagacccgcuacgcgcccgugaacuggggcuccugggagaucaacgacagcacgaccgucgagccggugcucgacgggcccuaccagcccaccaccuucaagcccccgaacgacuacuggcugcugaucuccagcaacacgaacggcguggucuacgaguccaccaacaacaacgacuucuggaccgccgugagcuccguggagccccacgucagccagaccaaccggcaguacauccucuucggcgagaacaagcaguucaacguggagaacaacuccgacaaguggaaguucuucgagacguucaccgggagcucccagggcaacuucagcaaccgccggacccugaccuccagcaaccgccugguggggaugcucaaguacggcgggcgggucuggacguuccacggcgagacgccccgcgccaccaccgacuccagcaacaccgccgaccugaacaacaucuccaucaucauccacagcgaguucuacaucaucccccggagccaggaguccaagugcaacgaguacaucaacaacggccugagcgggggcgacaucaucaagcuccugaacgagcaggucaacaaggagaugcaguccagcaaccuguacauguccaugagcuccuggugcuacacccacagccucgacggggccggccuguuccuguucgaccacgcggccgaggaguacgagcacgccaagaagcucaucaucuuccugaacgagaacaacgugccggugcagcugaccuccaucagcgcccccgagcacaaguucgagggccucacccagaucuuccagaaggcguacgagcacgagcagcacaucuccgagagcaucaacaacaucguggaccacgccaucaaguccaaggaccacgccacguucaacuuccugcagugguacguggccgagcagcacgaggaggagguccuguucaaggacauccucgacaagaucgagcugaucgggaacgagaaccacggccuguaccucgccgaccaguacgugaaggggaucgccaagagccgcaaguccugaggacuaguuauaagacugacuagcccgaugggccucccaacgggcccuccuccccuccuugcaccgagauuaauaaaaaaaaaaaaaaaaaaaaaaaaaaaaaaaaaaaaaaaaaaaaaaaaaaaaaaaaaaaaaaaaaaaaaaaaaaaaaaaaaaaaaaaaaaaaaaaaaaaa

SEQ ID NO: 975 - RNA, 1302 nt, Artificial Sequence; identical to SEQ ID NO: 974
  mRNA product Design i-3 (A100) comprising derived and/or modified sequence from RVA/DS-1/P[4]__ABV53252.1__P2_VP8*(41-223)_Ferritin (opt1)

SEQ ID NO: 976 - RNA, 1302 nt, Artificial Sequence
  mRNA product Design i-3 (A100) comprising derived and/or modified sequence from RVA/F01322/P[6]__AFA51886.1__P2_VP8*(41-223)_Ferritin (opt1)
aggagaaagcuuaccaugcaguacaucaaggccaacagcaaguucaucggcaucaccgagcugggguccggcagcggggcccagaccaacuacgcgcccgugacguggucccacggcgaggucaacgacagcaccaccaucgagccggugcucgacgggcccuaccagcccaccaacuucaagcccccgaacgacuacuggauccugcugaaccccacgaaccagcaggucgugcucgagggcaccaacaagaccgacaucuggguggcccugcugcucguggagcccaacgucaccaaccagucccgccaguacacgcuguucggcgagaccaagcagaucaccguggagaacaacaccaacaaguggaaguucuucgagauguuccggagcuccgugagcgccgaguuccagcacaagcgcacgcugaccuccgacaccaagcucgccggguucaugaaguucuacaacagcgucuggaccuuccacggcgagacgcccaacgccaccaccgacuacuccagcaccuccaaccuguucgagguggagacggugauccacgucgaguucuacaucaucccgcggagccaggaguccaagugcagcgaguacaucaacaccgggcuguccggcggggacaucaucaagcuccugaacgagcaggucaacaaggagaugcagagcuccaaccuguacaugagcaugagcuccuggugcuacacccacagccucgacggcgcgggccuguuccuguucgaccacgccgccgaggaguacgagcacgccaagaagcucaucaucuuccugaacgagaacaacgugcccgugcagcugaccuccaucagcgcgcccgagcacaaguucgaggggcucacgcagaucuuccagaaggccuacgagcacgagcagcacaucuccgagagcaucaacaacaucguggaccacgccaucaaguccaaggaccacgccaccuucaacuuccugcagugguacguggccgagcagcacgaggaggagguccuguucaaggacauccucgacaagaucgagcugaucggcaacgagaaccacgggcuguaccucgcggaccaguacgugaagggcaucgccaagagccgcaaguccugaggacuaguuauaagacugacuagcccgaugggccucccaacgggcccuccuccccuccuugcaccgagauuaauaaaaaaaaaaaaaaaaaaaaaaaaaaaaaaaaaaaaaaaaaaaaaaaaaaaaaaaaaaaaaaaaaaaaaaaaaaaaaaaaaaaaaaaaaaaaaaaaaaaa

SEQ ID NO: 977 - RNA, 1302 nt, Artificial Sequence
  mRNA product Design i-3 (A100) comprising derived and/or modified sequence from RVA/1076/P[6]__AAA47337.1__P2_VP8*(41-223)_Ferritin (opt1)
aggagaaagcuuaccaugcaguacaucaaggccaacagcaaguucaucggcaucaccgagcugggguccggcagcggggcccagaccaacuacgcgcccgugacguggucccacggcgaggucaacgacagcaccaccaucgagccggugcucgacgggcccuaccagcccaccuccuucaagcccccgagcgacuacuggauccugcugaaccccacgaaccagcaggucgugcucgagggcaccaacaagaccgacaucuggguggcccugcugcucguggagcccaacgucaccaaccagucccgccaguacacgcuguucggcgagaccaagcagaucaccguggagaacaacaccaacaaguggaaguucuucgagauguuccggagcuccgugagcgccgaguuccagcacaagcgcacgcugaccuccgacaccaagcucgccggguuccugaaguucuacaacagcgucuggaccuucuacggcgagacgccccacgccaccaccgacuacuccagcaccuccaaccugagcgagguggagacggcgauccacguggaguucuacaucaucccgcggucccaggagagcaagugcaacgaguacaucaacaccgggcucuccggcggggacaucaucaagcugcugaacgagcaggucaacaaggagaugcagagcagcaaccucuacauguccaugagcuccuggugcuacacccacagccuggacggcgccggccuguuccucuucgaccacgccgccgaggaguacgagcacgcgaagaagcugaucaucuuccugaacgagaacaacgugcccgugcagcucaccuccaucagcgcccccgagcacaaguucgaggggcugacgcagaucuuccagaaggccuacgagcacgagcagcacaucuccgagagcaucaacaacaucgucgaccacgccaucaaguccaaggaccacgccaccuucaacuuccugcagugguacguggcggagcagcacgaggaggagguccucuucaaggacauccuggacaagaucgagcugaucggcaacgagaaccacgggcucuaccuggccgaccaguacgugaagggcaucgccaagagccgcaaguccugaggacuaguuauaagacugacuagcccgaugggccucccaacgggcccuccuccccuccuugcaccgagauuaauaaaaaaaaaaaaaaaaaaaaaaaaaaaaaaaaaaaaaaaaaaaaaaaaaaaaaaaaaaaaaaaaaaaaaaaaaaaaaaaaaaaaaaaaaaaaaaaaaaaa

SEQ ID NO: 978 - RNA, 1302 nt, Artificial Sequence
  mRNA product Design i-3 (A100) comprising derived and/or modified sequence from RVA/BE1128/P[8]__AEX30671.1__P2_VP8*(41-223)_Ferritin (opt1)
aggagaaagcuuaccaugcaguacaucaaggccaacagcaaguucaucggcaucaccgagcugggguccggcagcggggcccagacccgcuacgcgcccgugaacuggggccacggggagaucaacgacuccacgaccgucgagccgauccucgacggccccuaccagcccaccaccuucacgcccccgaccgacuacuggauccugaucaccagcaacaccaacggcgugguguacgaguccacgaacaacagcgacuucuggaccgccgucaucgccguggagccccacgugaaccccgucgaccggcaguacaacguguucggggagaacaagcaguucaacgugcgcaacgacuccgacaaguggaaguuccuggagauguuccggggcagcucccagaacgacuucuacaaccgccggacccucaccagcgacacgcgccuggucgggauccugaaguacggcgggcggguguggaccuuccacggcgagacgccccgcgccaccaccgacuccagcaacaccgccaaccucgacggcaucuccaucaccauccacagcgaguucuacaucaucccgcggucccaggagagcaagugcaacgaguacaucaacaacgggcuguccggcggggacaucaucaagcugcucaacgagcaggucaacaaggagaugcagagcuccaaccuguacaugagcaugagcuccuggugcuacacccacagccuggacggcgcgggccucuuccuguucgaccacgccgccgaggaguacgagcacgccaagaagcugaucaucuuccucaacgagaacaacgugcccgugcagcugacguccaucagcgcgcccgagcacaaguucgaggggcugacccagaucuuccagaaggccuacgagcacgagcagcacaucuccgagagcaucaacaacaucguggaccacgccaucaaguccaaggaccacgccaccuucaacuuccuccagugguacgucgccgagcagcacgaggaggaggugcuguucaaggacauccuggacaagaucgagcucaucggcaacgagaaccacgggcuguaccuggcggaccaguacgugaagggcaucgccaagagccgcaaguccugaggacuaguuauaagacugacuagcccgaugggccucccaacgggcccuccuccccuccuugcaccgagauuaauaaaaaaaaaaaaaaaaaaaaaaaaaaaaaaaaaaaaaaaaaaaaaaaaaaaaaaaaaaaaaaaaaaaaaaaaaaaaaaaaaaaaaaaaaaaaaaaaaaaa

SEQ ID NO: 979 - RNA, 1302 nt, Artificial Sequence
  mRNA product Design i-3 (A100) comprising derived and/or modified sequence from RVA/Wa-VirWa/P[8]__ACR22783.1__P2_VP8*(41-223)_Ferritin (opt1)
aggagaaagcuuaccaugcaguacaucaaggccaacagcaaguucaucggcaucaccgagcugggguccggcagcggggcccagacccgcuacgcgcccgugaacuggggccacggggagaucaacgacuccacgaccgucgagccgauccucgacggccccuaccagcccaccaccuucacgcccccgaacgacuacuggauccugaucaacagcaacaccaacggcgugguguacgaguccaccaacaacagcgacuucuggaccgccgucguggccaucgagccccacgugaaccccgucgaccggcaguacacgaucuucggggaguccaagcaguucaacgugcgcaacgacagcaacaaguggaaguuccuggagauguuccgguccagcucccagaacgaguucuacaaccgccggacccucaccagcgacacccgccuggugggcauccugaaguacgggggccgggucuggacguuccacggggagacgccccgcgccaccaccgacuccagcuccaccgccaaccucaacaacaucagcaucaccauccacuccgaguucuacaucaucccgcggagccaggaguccaagugcaacgaguacaucaacaacggccugagcggcggggacaucaucaagcugcucaacgagcaggucaacaaggagaugcagagcuccaaccuguacaugagcauguccagcuggugcuacacccacucccuggacggcgcgggccucuuccuguucgaccacgccgccgaggaguacgagcacgccaagaagcugaucaucuuccucaacgagaacaacgugcccgugcagcugaccagcaucuccgcgcccgagcacaaguucgaggggcugacgcagaucuuccagaaggccuacgagcacgagcagcacaucagcgaguccaucaacaacaucguggaccacgccaucaagagcaaggaccacgccaccuucaacuuccuccagugguacguggccgagcagcacgaggaggagguccuguucaaggacauccuggacaagaucgagcucaucggcaacgagaaccacgggcuguaccuggcggaccaguacgugaagggcaucgccaagucccgcaagagcugaggacuaguuauaagacugacuagcccgaugggccucccaacgggcccuccuccccuccuugcaccgagauuaauaaaaaaaaaaaaaaaaaaaaaaaaaaaaaaaaaaaaaaaaaaaaaaaaaaaaaaaaaaaaaaaaaaaaaaaaaaaaaaaaaaaaaaaaaaaaaaaaaaaa

SEQ ID NO: 980 - RNA, 1302 nt, Artificial Sequence
  mRNA product Design i-3 (A100) comprising derived and/or modified sequence from RVA/Wa/P[8]__AAA47290.1__P2_VP8*(41-223)_Ferritin (opt1)
aggagaaagcuuaccaugcaguacaucaaggccaacagcaaguucaucggcaucaccgagcugggguccggcagcggggcccagacccgcuacgcgcccgugaacuggggccacggggagaucaacgacuccacgaccgucgagccgauccucgacggccccuaccagcccaccaccuucacgcccccgaacgacuacuggauccugaucaacagcaacaccaacggcgugguguacgaguccaccaacaacagcgacuucuggaccgccgucguggccaucgagccccacgugaaccccgucgaccggcaguacacgaucuucggggaguccaagcaguucaacgugagcaacgacuccaacaaguggaaguuccuggagauguuccgcagcuccagccagaacgaguucuacaaccggcgcacccucaccuccgacacccgguucgugggcauccugaaguacgggggccgcgucuggacguuccacggggagacgccccgggccaccaccgacagcuccagcaccgccaaccugaacaacaucuccaucaccauccacagcgaguucuacaucaucccgcgcucccaggagagcaagugcaacgaguacaucaacaacggccucagcggcggggacaucaucaagcugcugaacgagcaggucaacaaggagaugcaguccagcaaccucuacauguccaugagcuccuggugcuacacccacagccuggacggcgcggggcuguuccucuucgaccacgccgccgaggaguacgagcacgccaagaagcugaucaucuuccugaacgagaacaacgugcccgugcagcucaccuccaucagcgcgcccgagcacaaguucgagggccugacgcagaucuuccagaaggccuacgagcacgagcagcacaucuccgagagcaucaacaacaucguggaccacgccaucaaguccaaggaccacgccaccuucaacuuccugcagugguacguggccgagcagcacgaggaggagguccucuucaaggacauccuggacaagaucgagcugaucggcaacgagaaccacgggcucuaccuggcggaccaguacgugaagggcaucgccaagagccggaaguccugaggacuaguuauaagacugacuagcccgaugggccucccaacgggcccuccuccccuccuugcaccgagauuaauaaaaaaaaaaaaaaaaaaaaaaaaaaaaaaaaaaaaaaaaaaaaaaaaaaaaaaaaaaaaaaaaaaaaaaaaaaaaaaaaaaaaaaaaaaaaaaaaaaaa

SEQ ID NO: 981 - RNA, 1302 nt, Artificial Sequence
  mRNA product Design i-3 (A100) comprising derived and/or modified sequence from RVA/Wa/P[8]__AAA66953.1__P2_VP8*(41-223)_Ferritin (opt1)
aggagaaagcuuaccaugcaguacaucaaggccaacagcaaguucaucggcaucaccgagcugggguccggcagcggggcccagacccgcuacgcgcccgugaacuggggccacggggagaucaacgacuccacgaccgucgagccgaugcucgacggccccuaccagcccaccaccuucacgcccccgaacgacuacuggauccugaucaacagcaacaccaacggcgugguguacgaguccaccaacaacagcgacuucuggaccgccgucguggccaucgagccccacgugaaccccgucgaccggcaguacacgaucuucggggaguccaagcaguucaacgugagcaacgacuccaacaaguggaaguuccuggagauguuccgcagcuccagccagaacgaguucuacaaccggcgcacccucaccuccgacacccgguucgugggcauccugaaguacgggggccgcgucuggacguuccacggggagacgccccgggccaccaccgacagcuccagcaccgccaaccugaacaacaucuccaucaccauccacagcgaguucuacaucaucccgcgcucccaggagagcaagugcaacgaguacaucaacaacggccucagcggcggggacaucaucaagcugcugaacgagcaggucaacaaggagaugcaguccagcaaccucuacauguccaugagcuccuggugcuacacccacagccuggacggcgcggggcuguuccucuucgaccacgccgccgaggaguacgagcacgccaagaagcugaucaucuuccugaacgagaacaacgugcccgugcagcucaccuccaucagcgcgcccgagcacaaguucgagggccugacgcagaucuuccagaaggccuacgagcacgagcagcacaucuccgagagcaucaacaacaucguggaccacgccaucaaguccaaggaccacgccaccuucaacuuccugcagugguacguggccgagcagcacgaggaggagguccucuucaaggacauccuggacaagaucgagcugaucggcaacgagaaccacgggcucuaccuggcggaccaguacgugaagggcaucgccaagagccggaaguccugaggacuaguuauaagacugacuagcccgaugggccucccaacgggcccuccuccccuccuugcaccgagauuaauaaaaaaaaaaaaaaaaaaaaaaaaaaaaaaaaaaaaaaaaaaaaaaaaaaaaaaaaaaaaaaaaaaaaaaaaaaaaaaaaaaaaaaaaaaaaaaaaaaaa

SEQ ID NO: 982 - RNA, 1236 nt, Artificial Sequence
  mRNA product Design i-3 (A100) comprising derived and/or modified sequence from RVA/BE1058/P[4]__AEX30665.1__LumSynt_P2_VP8*(65-223) (opt1)
aggagaaagcuuaccaugcagaucuacgagggcaagcugaccgccgaggggcuccgcuucggcaucguggccagccgguucaaccacgcgcuggucgaccgccugguggagggggccaucgacgccaucgugcggcacggcgggcgcgaggaggacaucacccucguccgggugcccggcuccugggagaucccgguggccgccggcgagcuggcgcgcaaggaggacaucgacgccgucaucgccaucggggugcugauccggggcgccacgccccacuucgacuacaucgcgagcgagguguccaaggggcucgccgaccugagccuggagcuccgcaagcccaucaccuucggcgucaucaccgccgacacccuggagcaggccaucgagcgggccgggacgaagcacggcaacaagggcugggaggcggcccuguccgccaucgagauggccaaccucuucaagagccugcgcgggggcuccgggggcagcggcggguccggcgggagcggcgggggccaguacaucaaggccaacuccaaguucaucggcaucaccgagcuggggagcggcuccgggcucgacggccccuaccagccgaccaccuucaagccgcccaacgacuacuggcugcugaucagcuccaacacggacggggugguguacgagagcaccaacaacuccgacuucuggaccgcggucaucgccguggagccccacgugaaccagaccaaccggcaguacguccucuucggcgagaacaagcaguucaacaucgagaacagcuccgacaaguggaaguucuucgagauguucaagggcaacagccagagcgacuucuccaaccgccggacgcugaccagcuccaaccgccugguggggaugcucaaguacggcgggcggguguggaccuuccacggcgagacgccccgcgccaccaccgacagcuccagcaccgccgaccugaacaacaucuccaucaucauccacagcgaguucuacaucaucccccggucccaggagagcaagugcaacgaguacaucaacaacgggcugugaggacuaguuauaagacugacuagcccgaugggccucccaacgggcccuccuccccuccuugcaccgagauuaauaaaaaaaaaaaaaaaaaaaaaaaaaaaaaaaaaaaaaaaaaaaaaaaaaaaaaaaaaaaaaaaaaaaaaaaaaaaaaaaaaaaaaaaaaaaaaaaaaaaa

SEQ ID NO: 983 - RNA, 1236 nt, Artificial Sequence
  mRNA product Design i-3 (A100) comprising derived and/or modified sequence from RVA/DS-1/P[4]__CAD62680.1__LumSynt_P2_VP8*(65-223) (opt1)
aggagaaagcuuaccaugcagaucuacgagggcaagcugaccgccgaggggcuccgcuucggcaucguggccagccgguucaaccacgcgcuggucgaccgccugguggagggggccaucgacgccaucgugcggcacggcgggcgcgaggaggacaucacccucguccgggugcccggcuccugggagaucccgguggccgccggcgagcuggcgcgcaaggaggacaucgacgccgucaucgccaucggggugcugauccggggcgccacgccccacuucgacuacaucgcgagcgagguguccaaggggcucgccgaccugagccuggagcuccgcaagcccaucaccuucggcgucaucaccgccgacacccuggagcaggccaucgagcgggccgggacgaagcacggcaacaagggcugggaggcggcccuguccgccaucgagauggccaaccucuucaagagccugcgcgggggcuccgggggcagcggcggguccggcgggagcggcgggggccaguacaucaaggccaacuccaaguucaucggcaucaccgagcuggggagcggcuccgggcucgacggccccuaccagccgaccaccuucaagccgcccaacgacuacuggcugcugaucagcuccaacacgaacggggugguguacgagagcaccaacaacaacgacuucuggaccgcggucuccagcguggagccccacgugucccagaccaaccggcaguacauccucuucggcgagaacaagcaguucaacgucgagaacaacagcgacaaguggaaguucuucgagacguucaccggcagcucccaggggaacuucagcaaccgccggacccugaccuccagcaaccgccuggugggcaugcucaaguacgggggccggguguggacguuccacggggagacgccccgcgccaccaccgacuccagcaacaccgccgaccugaacaacaucuccaucaucauccacagcgaguucuacaucaucccccggucccaggagagcaagugcaacgaguacaucaacaacggccugugaggacuaguuauaagacugacuagcccgaugggccucccaacgggcccuccuccccuccuugcaccgagauuaauaaaaaaaaaaaaaaaaaaaaaaaaaaaaaaaaaaaaaaaaaaaaaaaaaaaaaaaaaaaaaaaaaaaaaaaaaaaaaaaaaaaaaaaaaaaaaaaaaaaa

SEQ ID NO: 984 - RNA, 1236 nt, Artificial Sequence; identical to SEQ ID NO: 983
  mRNA product Design i-3 (A100) comprising derived and/or modified sequence from RVA/DS-1/P[4]__ABV53252.1__LumSynt_P2_VP8*(65-223) (opt1)

SEQ ID NO: 985 - RNA, 1236 nt, Artificial Sequence
  mRNA product Design i-3 (A100) comprising derived and/or modified sequence from RVA/F01322/P[6]__AFA51886.1__LumSynt_P2_VP8*(65-223) (opt1)
aggagaaagcuuaccaugcagaucuacgagggcaagcugaccgccgaggggcuccgcuucggcaucguggccagccgguucaaccacgcgcuggucgaccgccugguggagggggccaucgacgccaucgugcggcacggcgggcgcgaggaggacaucacccucguccgggugcccggcuccugggagaucccgguggccgccggcgagcuggcgcgcaaggaggacaucgacgccgucaucgccaucggggugcugauccggggcgccacgccccacuucgacuacaucgcgagcgagguguccaaggggcucgccgaccugagccuggagcuccgcaagcccaucaccuucggcgucaucaccgccgacacccuggagcaggccaucgagcgggccgggacgaagcacggcaacaagggcugggaggcggcccuguccgccaucgagauggccaaccucuucaagagccugcgcgggggcuccgggggcagcggcggguccggcgggagcggcgggggccaguacaucaaggccaacuccaaguucaucggcaucaccgagcuggggagcggcuccgggcucgacggccccuaccagccgaccaacuucaagccgcccaacgacuacuggauccugcugaaccccaccaaccagcaggucgugcucgaggggacgaacaagaccgacaucuggguggcgcugcugcucguggagcccaacgugaccaaccagagccggcaguacacccuguucggcgagacgaagcagaucaccgucgagaacaacaccaacaaguggaaguucuucgagauguuccgcuccagcguguccgccgaguuccagcacaagcggacccugacgagcgacaccaagcucgccggcuucaugaaguucuacaacuccguguggaccuuccacggggagacccccaacgccacgaccgacuacagcagcaccuccaaccuguucgaggucgagaccgugauccacguggaguucuacaucaucccccgcagccaggaguccaagugcagcgaguacaucaacacgggccugugaggacuaguuauaagacugacuagcccgaugggccucccaacgggcccuccuccccuccuugcaccgagauuaauaaaaaaaaaaaaaaaaaaaaaaaaaaaaaaaaaaaaaaaaaaaaaaaaaaaaaaaaaaaaaaaaaaaaaaaaaaaaaaaaaaaaaaaaaaaaaaaaaaaa

SEQ ID NO: 986 - RNA, 1236 nt, Artificial Sequence
  mRNA product Design i-3 (A100) comprising derived and/or modified sequence from RVA/1076/P[6]__AAA47337.1__LumSynt_P2_VP8*(65-223) (opt1)
aggagaaagcuuaccaugcagaucuacgagggcaagcugaccgccgaggggcuccgcuucggcaucguggccagccgguucaaccacgcgcuggucgaccgccugguggagggggccaucgacgccaucgugcggcacggcgggcgcgaggaggacaucacccucguccgggugcccggcuccugggagaucccgguggccgccggcgagcuggcgcgcaaggaggacaucgacgccgucaucgccaucggggugcugauccggggcgccacgccccacuucgacuacaucgcgagcgagguguccaaggggcucgccgaccugagccuggagcuccgcaagcccaucaccuucggcgucaucaccgccgacacccuggagcaggccaucgagcgggccgggacgaagcacggcaacaagggcugggaggcggcccuguccgccaucgagauggccaaccucuucaagagccugcgcgggggcuccgggggcagcggcggguccggcgggagcggcgggggccaguacaucaaggccaacuccaaguucaucggcaucaccgagcuggggagcggcuccgggcucgacggccccuaccagccgaccagcuucaagccgcccuccgacuacuggauccugcugaaccccaccaaccagcaggucgugcucgaggggacgaacaagaccgacaucuggguggcgcugcugcucguggagcccaacgugaccaaccagagccggcaguacacccuguucggcgagacgaagcagaucaccgucgagaacaacaccaacaaguggaaguucuucgagauguuccgcuccagcguguccgccgaguuccagcacaagcggacccugacgagcgacaccaagcucgccggcuuccugaaguucuacaacagcguguggaccuucuacggggagacgccccacgccaccaccgacuacuccagcaccuccaaccugagcgaggucgagaccgccauccacguggaguucuacaucaucccccgcucccaggagagcaagugcaacgaguacaucaacacgggccucugaggacuaguuauaagacugacuagcccgaugggccucccaacgggcccuccuccccuccuugcaccgagauuaauaaaaaaaaaaaaaaaaaaaaaaaaaaaaaaaaaaaaaaaaaaaaaaaaaaaaaaaaaaaaaaaaaaaaaaaaaaaaaaaaaaaaaaaaaaaaaaaaaaaa

SEQ ID NO: 987 - RNA, 1236 nt, Artificial Sequence
  mRNA product Design i-3 (A100) comprising derived and/or modified sequence from RVA/BE1128/P[8]__AEX30671.1__LumSynt_P2_VP8*(65-223) (opt1)
aggagaaagcuuaccaugcagaucuacgagggcaagcugaccgccgaggggcuccgcuucggcaucguggccagccgguucaaccacgcgcuggucgaccgccugguggagggggccaucgacgccaucgugcggcacggcgggcgcgaggaggacaucacccucguccgggugcccggcuccugggagaucccgguggccgccggcgagcuggcgcgcaaggaggacaucgacgccgucaucgccaucggggugcugauccggggcgccacgccccacuucgacuacaucgcgagcgagguguccaaggggcucgccgaccugagccuggagcuccgcaagcccaucaccuucggcgucaucaccgccgacacccuggagcaggccaucgagcgggccgggacgaagcacggcaacaagggcugggaggcggcccuguccgccaucgagauggccaaccucuucaagagccugcgcgggggcuccgggggcagcggcggguccggcgggagcggcgggggccaguacaucaaggccaacuccaaguucaucggcaucaccgagcuggggagcggcuccgggcucgacggccccuaccagccgaccaccuucacgccgcccaccgacuacuggauccugaucaccagcaacaccaacggggugguguacgaguccacgaacaacagcgacuucuggaccgcggucaucgccguggagccccacgugaaccccgucgaccggcaguacaacguguucggcgagaacaagcaguucaacgugcgcaacgacuccgacaaguggaaguuccuggagauguuccggggcagcucccagaacgacuucuacaaccgccggacccucaccagcgacacgcgccuggucgggauccugaaguacggcgggcggguguggaccuuccacggcgagacgccccgcgccaccaccgacagcuccaacaccgccaaccucgacgggaucagcaucaccauccacuccgaguucuacaucaucccccggagccaggaguccaagugcaacgaguacaucaacaacggccugugaggacuaguuauaagacugacuagcccgaugggccucccaacgggcccuccuccccuccuugcaccgagauuaauaaaaaaaaaaaaaaaaaaaaaaaaaaaaaaaaaaaaaaaaaaaaaaaaaaaaaaaaaaaaaaaaaaaaaaaaaaaaaaaaaaaaaaaaaaaaaaaaaaaa

SEQ ID NO: 988 - RNA, 1236 nt, Artificial Sequence
  mRNA product Design i-3 (A100) comprising derived and/or modified sequence from RVA/Wa-VirWa/P[8]__ACR22783.1__LumSynt_P2_VP8*(65-223) (opt1)
aggagaaagcuuaccaugcagaucuacgagggcaagcugaccgccgaggggcuccgcuucggcaucguggccagccgguucaaccacgcgcuggucgaccgccugguggagggggccaucgacgccaucgugcggcacggcgggcgcgaggaggacaucacccucguccgggugcccggcuccugggagaucccgguggccgccggcgagcuggcgcgcaaggaggacaucgacgccgucaucgccaucggggugcugauccggggcgccacgccccacuucgacuacaucgcgagcgagguguccaaggggcucgccgaccugagccuggagcuccgcaagcccaucaccuucggcgucaucaccgccgacacccuggagcaggccaucgagcgggccgggacgaagcacggcaacaagggcugggaggcggcccuguccgccaucgagauggccaaccucuucaagagccugcgcgggggcuccgggggcagcggcggguccggcgggagcggcgggggccaguacaucaaggccaacuccaaguucaucggcaucaccgagcuggggagcggcuccgggcucgacggccccuaccagccgaccaccuucacgccgcccaacgacuacuggauccugaucaacagcaacaccaacggggugguguacgaguccaccaacaacagcgacuucuggaccgcggucguggccaucgagccccacgugaaccccgucgaccggcaguacacgaucuucggcgaguccaagcaguucaacgugcgcaacgacagcaacaaguggaaguuccuggagauguuccgguccagcagccagaacgaguucuacaaccgccggacccucaccuccgacacccgccuggugggcauccugaaguacgggggccgggucuggacguuccacggggagacgccccgcgccaccaccgacagcuccagcaccgccaaccucaacaacaucuccaucaccauccacagcgaguucuacaucaucccccggucccaggagagcaagugcaacgaguacaucaacaacggccugugaggacuaguuauaagacugacuagcccgaugggccucccaacgggcccuccuccccuccuugcaccgagauuaauaaaaaaaaaaaaaaaaaaaaaaaaaaaaaaaaaaaaaaaaaaaaaaaaaaaaaaaaaaaaaaaaaaaaaaaaaaaaaaaaaaaaaaaaaaaaaaaaaaaa

SEQ ID NO: 989 - RNA, 1236 nt, Artificial Sequence
  mRNA product Design i-3 (A100) comprising derived and/or modified sequence from RVA/Wa/P[8]__AAA47290.1__LumSynt_P2_VP8*(65-223) (opt1)
aggagaaagcuuaccaugcagaucuacgagggcaagcugaccgccgaggggcuccgcuucggcaucguggccagccgguucaaccacgcgcuggucgaccgccugguggagggggccaucgacgccaucgugcggcacggcgggcgcgaggaggacaucacccucguccgggugcccggcuccugggagaucccgguggccgccggcgagcuggcgcgcaaggaggacaucgacgccgucaucgccaucggggugcugauccggggcgccacgccccacuucgacuacaucgcgagcgagguguccaaggggcucgccgaccugagccuggagcuccgcaagcccaucaccuucggcgucaucaccgccgacacccuggagcaggccaucgagcgggccgggacgaagcacggcaacaagggcugggaggcggcccuguccgccaucgagauggccaaccucuucaagagccugcgcgggggcuccgggggcagcggcggguccggcgggagcggcgggggccaguacaucaaggccaacuccaaguucaucggcaucaccgagcuggggagcggcuccgggcucgacggccccuaccagccgaccaccuucacgccgcccaacgacuacuggauccugaucaacagcaacaccaacggggugguguacgaguccaccaacaacagcgacuucuggaccgcggucguggccaucgagccccacgugaaccccgucgaccggcaguacacgaucuucggcgaguccaagcaguucaacgugagcaacgacuccaacaaguggaaguuccuggagauguuccgcagcagcucccagaacgaguucuacaaccggcgcacccucaccagcgacacccgguucgugggcauccugaaguacgggggccgcgucuggacguuccacggggagacgccccgggccaccaccgacuccagcuccaccgccaaccugaacaacaucagcaucaccauccacuccgaguucuacaucaucccccgcagccaggaguccaagugcaacgaguacaucaacaacggccucugaggacuaguuauaagacugacuagcccgaugggccucccaacgggcccuccuccccuccuugcaccgagauuaauaaaaaaaaaaaaaaaaaaaaaaaaaaaaaaaaaaaaaaaaaaaaaaaaaaaaaaaaaaaaaaaaaaaaaaaaaaaaaaaaaaaaaaaaaaaaaaaaaaaa

SEQ ID NO: 990 - RNA, 1236 nt, Artificial Sequence; identical to SEQ ID NO: 989
  mRNA product Design i-3 (A100) comprising derived and/or modified sequence from RVA/Wa/P[8]__AAA66953.1__LumSynt_P2_VP8*(65-223) (opt1)

SEQ ID NO: 991 - RNA, 1308 nt, Artificial Sequence
  mRNA product Design i-3 (A100) comprising derived and/or modified sequence from RVA/BE1058/P[4]__AEX30665.1__LumSynt_P2_VP8*(41-223) (opt1)
aggagaaagcuuaccaugcagaucuacgagggcaagcugaccgccgaggggcuccgcuucggcaucguggccagccgguucaaccacgcgcuggucgaccgccugguggagggggccaucgacgccaucgugcggcacggcgggcgcgaggaggacaucacccucguccgggugcccggcuccugggagaucccgguggccgccggcgagcuggcgcgcaaggaggacaucgacgccgucaucgccaucggggugcugauccggggcgccacgccccacuucgacuacaucgcgagcgagguguccaaggggcucgccgaccugagccuggagcuccgcaagcccaucaccuucggcgucaucaccgccgacacccuggagcaggccaucgagcgggccgggacgaagcacggcaacaagggcugggaggcggcccuguccgccaucgagauggccaaccucuucaagagccugcgcgggggcuccgggggcagcggcggguccggcgggagcggcgggggccaguacaucaaggccaacuccaaguucaucggcaucaccgagcuggggagcggcuccggggcgcagacccgguacgcccccgugaacuggggccacggggagaucaacgacagcaccacgguggagccgguccucgacggccccuaccagcccaccaccuucaagcccccgaacgacuacuggcugcugaucuccagcaacaccgacggcgugguguacgaguccacgaacaacagcgacuucuggaccgccgucaucgccguggagccccacgugaaccagaccaaccgccaguacguccucuucggggagaacaagcaguucaacaucgagaacuccagcgacaaguggaaguucuucgagauguucaagggcaacagccaguccgacuucagcaaccggcgcacccugacguccagcaaccggcugguggggaugcucaaguacggcgggcgcguguggaccuuccacggcgagacgccccgggccaccaccgacuccagcuccaccgcggaccugaacaacaucagcaucaucauccacuccgaguucuacaucaucccccgcagccaggaguccaagugcaacgaguacaucaacaacggccugugaggacuaguuauaagacugacuagcccgaugggccucccaacgggcccuccuccccuccuugcaccgagauuaauaaaaaaaaaaaaaaaaaaaaaaaaaaaaaaaaaaaaaaaaaaaaaaaaaaaaaaaaaaaaaaaaaaaaaaaaaaaaaaaaaaaaaaaaaaaaaaaaaaaa

SEQ ID NO: 992 - RNA, 1308 nt, Artificial Sequence
  mRNA product Design i-3 (A100) comprising derived and/or modified sequence from RVA/DS-1/P[4]__CAD62680.1__LumSynt_P2_VP8*(41-223) (opt1)
aggagaaagcuuaccaugcagaucuacgagggcaagcugaccgccgaggggcuccgcuucggcaucguggccagccgguucaaccacgcgcuggucgaccgccugguggagggggccaucgacgccaucgugcggcacggcgggcgcgaggaggacaucacccucguccgggugcccggcuccugggagaucccgguggccgccggcgagcuggcgcgcaaggaggacaucgacgccgucaucgccaucggggugcugauccggggcgccacgccccacuucgacuacaucgcgagcgagguguccaaggggcucgccgaccugagccuggagcuccgcaagcccaucaccuucggcgucaucaccgccgacacccuggagcaggccaucgagcgggccgggacgaagcacggcaacaagggcugggaggcggcccuguccgccaucgagauggccaaccucuucaagagccugcgcgggggcuccgggggcagcggcggguccggcgggagcggcgggggccaguacaucaaggccaacuccaaguucaucggcaucaccgagcuggggagcggcuccggggcgcagacccgguacgcccccgugaacuggggcagcugggagaucaacgacuccaccacgguggagccgguccucgacgggcccuaccagcccaccaccuucaagcccccgaacgacuacuggcugcugaucagcuccaacaccaacggcgugguguacgagagcacgaacaacaacgacuucuggaccgccgucuccagcguggagccccacgugagccagaccaaccgccaguacauccucuucggcgagaacaagcaguucaacgucgagaacaacuccgacaaguggaaguucuucgagaccuucacggggagcucccagggcaacuucagcaaccggcgcacccugaccuccagcaaccggcugguggggaugcucaaguacggcgggcgcguguggaccuuccacggcgagacgccccgggccaccaccgacuccagcaacaccgccgaccugaacaacaucuccaucaucauccacagcgaguucuacaucaucccccgcucccaggagagcaagugcaacgaguacaucaacaacggccugugaggacuaguuauaagacugacuagcccgaugggccucccaacgggcccuccuccccuccuugcaccgagauuaauaaaaaaaaaaaaaaaaaaaaaaaaaaaaaaaaaaaaaaaaaaaaaaaaaaaaaaaaaaaaaaaaaaaaaaaaaaaaaaaaaaaaaaaaaaaaaaaaaaaa

SEQ ID NO: 993 - RNA, 1308 nt, Artificial Sequence; identical to SEQ ID NO: 992
  mRNA product Design i-3 (A100) comprising derived and/or modified sequence from RVA/DS-1/P[4]__ABV53252.1__LumSynt_P2_VP8*(41-223) (opt1)

SEQ ID NO: 994 - RNA, 1308 nt, Artificial Sequence
  mRNA product Design i-3 (A100) comprising derived and/or modified sequence from RVA/F01322/P[6]__AFA51886.1__LumSynt_P2_VP8*(41-223) (opt1)
aggagaaagcuuaccaugcagaucuacgagggcaagcugaccgccgaggggcuccgcuucggcaucguggccagccgguucaaccacgcgcuggucgaccgccugguggagggggccaucgacgccaucgugcggcacggcgggcgcgaggaggacaucacccucguccgggugcccggcuccugggagaucccgguggccgccggcgagcuggcgcgcaaggaggacaucgacgccgucaucgccaucggggugcugauccggggcgccacgccccacuucgacuacaucgcgagcgagguguccaaggggcucgccgaccugagccuggagcuccgcaagcccaucaccuucggcgucaucaccgccgacacccuggagcaggccaucgagcgggccgggacgaagcacggcaacaagggcugggaggcggcccuguccgccaucgagauggccaaccucuucaagagccugcgcgggggcuccgggggcagcggcggguccggcgggagcggcgggggccaguacaucaaggccaacuccaaguucaucggcaucaccgagcuggggagcggcuccggggcgcagaccaacuacgcccccgugaccuggagccacggcgaggugaacgacuccacgaccaucgagccgguccucgacgggcccuaccagcccaccaacuucaagcccccgaacgacuacuggauccugcugaaccccaccaaccagcaggucgugcucgagggcacgaacaagaccgacaucuggguggcccugcugcucguggagcccaacgugaccaaccagagccggcaguacacccuguucggcgagacgaagcagaucaccgucgagaacaacaccaacaaguggaaguucuucgagauguuccgcuccagcguguccgccgaguuccagcacaagcggacccugacgagcgacaccaagcucgccggguucaugaaguucuacaacagcguguggaccuuccacggcgagacccccaacgcgacgaccgacuacuccagcaccuccaaccuguucgaggucgagaccgugauccacguggaguucuacaucaucccgcgcagccaggaguccaagugcagcgaguacaucaacacggggcugugaggacuaguuauaagacugacuagcccgaugggccucccaacgggcccuccuccccuccuugcaccgagauuaauaaaaaaaaaaaaaaaaaaaaaaaaaaaaaaaaaaaaaaaaaaaaaaaaaaaaaaaaaaaaaaaaaaaaaaaaaaaaaaaaaaaaaaaaaaaaaaaaaaaa

SEQ ID NO: 995 - RNA, 1308 nt, Artificial Sequence
  mRNA product Design i-3 (A100) comprising derived and/or modified sequence from RVA/1076/P[6]__AAA47337.1__LumSynt_P2_VP8*(41-223) (opt1)
aggagaaagcuuaccaugcagaucuacgagggcaagcugaccgccgaggggcuccgcuucggcaucguggccagccgguucaaccacgcgcuggucgaccgccugguggagggggccaucgacgccaucgugcggcacggcgggcgcgaggaggacaucacccucguccgggugcccggcuccugggagaucccgguggccgccggcgagcuggcgcgcaaggaggacaucgacgccgucaucgccaucggggugcugauccggggcgccacgccccacuucgacuacaucgcgagcgagguguccaaggggcucgccgaccugagccuggagcuccgcaagcccaucaccuucggcgucaucaccgccgacacccuggagcaggccaucgagcgggccgggacgaagcacggcaacaagggcugggaggcggcccuguccgccaucgagauggccaaccucuucaagagccugcgcgggggcuccgggggcagcggcggguccggcgggagcggcgggggccaguacaucaaggccaacuccaaguucaucggcaucaccgagcuggggagcggcuccggggcgcagaccaacuacgcccccgugaccuggagccacggcgaggugaacgacuccacgaccaucgagccgguccucgacgggcccuaccagcccaccagcuucaagcccccguccgacuacuggauccugcugaaccccaccaaccagcaggucgugcucgagggcacgaacaagaccgacaucuggguggcccugcugcucguggagcccaacgugaccaaccagagccggcaguacacccuguucggcgagacgaagcagaucaccgucgagaacaacaccaacaaguggaaguucuucgagauguuccgcuccagcgugagcgccgaguuccagcacaagcggacccugacguccgacaccaagcucgccggguuccugaaguucuacaacagcguguggaccuucuacggcgagacgccccacgcgaccaccgacuacuccagcaccuccaaccugagcgaggucgagaccgccauccacguggaguucuacaucaucccgcgcucccaggagagcaagugcaacgaguacaucaacacggggcucugaggacuaguuauaagacugacuagcccgaugggccucccaacgggcccuccuccccuccuugcaccgagauuaauaaaaaaaaaaaaaaaaaaaaaaaaaaaaaaaaaaaaaaaaaaaaaaaaaaaaaaaaaaaaaaaaaaaaaaaaaaaaaaaaaaaaaaaaaaaaaaaaaaaa

SEQ ID NO: 996 - RNA, 1308 nt, Artificial Sequence
  mRNA product Design i-3 (A100) comprising derived and/or modified sequence from RVA/BE1128/P[8]__AEX30671.1__LumSynt_P2_VP8*(41-223) (opt1)
aggagaaagcuuaccaugcagaucuacgagggcaagcugaccgccgaggggcuccgcuucggcaucguggccagccgguucaaccacgcgcuggucgaccgccugguggagggggccaucgacgccaucgugcggcacggcgggcgcgaggaggacaucacccucguccgggugcccggcuccugggagaucccgguggccgccggcgagcuggcgcgcaaggaggacaucgacgccgucaucgccaucggggugcugauccggggcgccacgccccacuucgacuacaucgcgagcgagguguccaaggggcucgccgaccugagccuggagcuccgcaagcccaucaccuucggcgucaucaccgccgacacccuggagcaggccaucgagcgggccgggacgaagcacggcaacaagggcugggaggcggcccuguccgccaucgagauggccaaccucuucaagagccugcgcgggggcuccgggggcagcggcggguccggcgggagcggcgggggccaguacaucaaggccaacuccaaguucaucggcaucaccgagcuggggagcggcuccggggcgcagacccgguacgcccccgugaacuggggccacggggagaucaacgacagcaccacgguggagccgauccucgacggccccuaccagcccaccaccuucacgcccccgaccgacuacuggauccugaucaccuccaacaccaacggcgucguguacgagagcaccaacaacuccgacuucuggacggccgugaucgccgucgagccccacgugaaccccguggaccgccaguacaacgucuucggggagaacaagcaguucaacgugcggaacgacagcgacaaguggaaguuccuggagauguuccgcggcuccagccagaacgacuucuacaaccggcgcacccucaccagcgacacccggcugguggggauccugaaguacggcgggcgcgucuggacguuccacggcgagacgccccgggccaccaccgacuccagcaacaccgcgaaccucgacggcaucuccaucaccauccacagcgaguucuacaucaucccgcgcucccaggagagcaagugcaacgaguacaucaacaacgggcugugaggacuaguuauaagacugacuagcccgaugggccucccaacgggcccuccuccccuccuugcaccgagauuaauaaaaaaaaaaaaaaaaaaaaaaaaaaaaaaaaaaaaaaaaaaaaaaaaaaaaaaaaaaaaaaaaaaaaaaaaaaaaaaaaaaaaaaaaaaaaaaaaaaaa

SEQ ID NO: 997 - RNA, 1308 nt, Artificial Sequence
  mRNA product Design i-3 (A100) comprising derived and/or modified sequence from RVA/Wa-VirWa/P[8]__ACR22783.1__LumSynt_P2_VP8*(41-223) (opt1)
aggagaaagcuuaccaugcagaucuacgagggcaagcugaccgccgaggggcuccgcuucggcaucguggccagccgguucaaccacgcgcuggucgaccgccugguggagggggccaucgacgccaucgugcggcacggcgggcgcgaggaggacaucacccucguccgggugcccggcuccugggagaucccgguggccgccggcgagcuggcgcgcaaggaggacaucgacgccgucaucgccaucggggugcugauccggggcgccacgccccacuucgacuacaucgcgagcgagguguccaaggggcucgccgaccugagccuggagcuccgcaagcccaucaccuucggcgucaucaccgccgacacccuggagcaggccaucgagcgggccgggacgaagcacggcaacaagggcugggaggcggcccuguccgccaucgagauggccaaccucuucaagagccugcgcgggggcuccgggggcagcggcggguccggcgggagcggcgggggccaguacaucaaggccaacuccaaguucaucggcaucaccgagcuggggagcggcuccggggcgcagacccgguacgcccccgugaacuggggccacggggagaucaacgacagcaccacgguggagccgauccucgacggccccuaccagcccaccaccuucacgcccccgaacgacuacuggauccugaucaacuccaacaccaacggcgucguguacgagagcaccaacaacuccgacuucuggaccgccguggucgccaucgagccccacgugaaccccguggaccgccaguacaccaucuucggggagagcaagcaguucaacguccggaacgacuccaacaaguggaaguuccuggagauguuccgcagcagcucccagaacgaguucuacaaccggcgcacgcucaccagcgacacccggcuggugggcauccugaaguacgggggccgcguguggaccuuccacggggagacgccccgggccaccaccgacuccagcuccaccgcgaaccucaacaacaucagcaucacgauccacuccgaguucuacaucaucccgcgcagccaggaguccaagugcaacgaguacaucaacaacggccugugaggacuaguuauaagacugacuagcccgaugggccucccaacgggcccuccuccccuccuugcaccgagauuaauaaaaaaaaaaaaaaaaaaaaaaaaaaaaaaaaaaaaaaaaaaaaaaaaaaaaaaaaaaaaaaaaaaaaaaaaaaaaaaaaaaaaaaaaaaaaaaaaaaaa

SEQ ID NO: 998 - RNA, 1308 nt, Artificial Sequence
  mRNA product Design i-3 (A100) comprising derived and/or modified sequence from RVA/Wa/P[8]__AAA47290.1__LumSynt_P2_VP8*(41-223) (opt1)
aggagaaagcuuaccaugcagaucuacgagggcaagcugaccgccgaggggcuccgcuucggcaucguggccagccgguucaaccacgcgcuggucgaccgccugguggagggggccaucgacgccaucgugcggcacggcgggcgcgaggaggacaucacccucguccgggugcccggcuccugggagaucccgguggccgccggcgagcuggcgcgcaaggaggacaucgacgccgucaucgccaucggggugcugauccggggcgccacgccccacuucgacuacaucgcgagcgagguguccaaggggcucgccgaccugagccuggagcuccgcaagcccaucaccuucggcgucaucaccgccgacacccuggagcaggccaucgagcgggccgggacgaagcacggcaacaagggcugggaggcggcccuguccgccaucgagauggccaaccucuucaagagccugcgcgggggcuccgggggcagcggcggguccggcgggagcggcgggggccaguacaucaaggccaacuccaaguucaucggcaucaccgagcuggggagcggcuccggggcgcagacccgguacgcccccgugaacuggggccacggggagaucaacgacagcaccacgguggagccgauccucgacggccccuaccagcccaccaccuucacgcccccgaacgacuacuggauccugaucaacuccaacaccaacggcgucguguacgagagcaccaacaacuccgacuucuggaccgccguggucgccaucgagccccacgugaaccccguggaccgccaguacaccaucuucggggagagcaagcaguucaacgucuccaacgacagcaacaaguggaaguuccuggagauguuccggagcuccagccagaacgaguucuacaaccgccggacgcucaccuccgacacccgcuucgugggcauccugaaguacgggggccggguguggaccuuccacggggagacgccccgcgccaccaccgacagcuccagcaccgcgaaccugaacaacaucuccaucacgauccacagcgaguucuacaucaucccgcggucccaggagagcaagugcaacgaguacaucaacaacggccucugaggacuaguuauaagacugacuagcccgaugggccucccaacgggcccuccuccccuccuugcaccgagauuaauaaaaaaaaaaaaaaaaaaaaaaaaaaaaaaaaaaaaaaaaaaaaaaaaaaaaaaaaaaaaaaaaaaaaaaaaaaaaaaaaaaaaaaaaaaaaaaaaaaaa

SEQ ID NO: 999 - RNA, 1308 nt, Artificial Sequence
  mRNA product Design i-3 (A100) comprising derived and/or modified sequence from RVA/Wa/P[8]__AAA66953.1__LumSynt_P2_VP8*(41-223) (opt1)
aggagaaagcuuaccaugcagaucuacgagggcaagcugaccgccgaggggcuccgcuucggcaucguggccagccgguucaaccacgcgcuggucgaccgccugguggagggggccaucgacgccaucgugcggcacggcgggcgcgaggaggacaucacccucguccgggugcccggcuccugggagaucccgguggccgccggcgagcuggcgcgcaaggaggacaucgacgccgucaucgccaucggggugcugauccggggcgccacgccccacuucgacuacaucgcgagcgagguguccaaggggcucgccgaccugagccuggagcuccgcaagcccaucaccuucggcgucaucaccgccgacacccuggagcaggccaucgagcgggccgggacgaagcacggcaacaagggcugggaggcggcccuguccgccaucgagauggccaaccucuucaagagccugcgcgggggcuccgggggcagcggcggguccggcgggagcggcgggggccaguacaucaaggccaacuccaaguucaucggcaucaccgagcuggggagcggcuccggggcgcagacccgguacgcccccgugaacuggggccacggggagaucaacgacagcaccacgguggagccgaugcucgacggccccuaccagcccaccaccuucacgcccccgaacgacuacuggauccugaucaacuccaacaccaacggcgucguguacgagagcaccaacaacuccgacuucuggaccgccguggucgccaucgagccccacgugaaccccguggaccgccaguacaccaucuucggggagagcaagcaguucaacgucuccaacgacagcaacaaguggaaguuccuggagauguuccggagcuccagccagaacgaguucuacaaccgccggacgcucaccuccgacacccgcuucgugggcauccugaaguacgggggccggguguggaccuuccacggggagacgccccgcgccaccaccgacagcuccagcaccgcgaaccugaacaacaucuccaucacgauccacagcgaguucuacaucaucccgcggucccaggagagcaagugcaacgaguacaucaacaacggccucugaggacuaguuauaagacugacuagcccgaugggccucccaacgggcccuccuccccuccuugcaccgagauuaauaaaaaaaaaaaaaaaaaaaaaaaaaaaaaaaaaaaaaaaaaaaaaaaaaaaaaaaaaaaaaaaaaaaaaaaaaaaaaaaaaaaaaaaaaaaaaaaaaaaa

SEQ ID NO: 1000 - RNA, 783 nt, Artificial Sequence
  mRNA product Design i-3 (A100) comprising derived and/or modified sequence from RVA/BE1058/P[4]__AEX30665.1__SP-IgE_P2_VP8*(65-223) (opt1)
aggagaaagcuuaccauggacuggaccuggauccuguuccucguggccgccgcgacccgcguccacagccaguacaucaaggccaacuccaaguucaucggcaucacggagcuggggagcggcuccgggcuggacggccccuaccagccgaccaccuucaagccgcccaacgacuacuggcuccugaucagcuccaacaccgacggggugguguacgagagcacgaacaacuccgacuucuggaccgccgucaucgccguggagccccacgugaaccagaccaaccggcaguacguccuguucggcgagaacaagcaguucaacaucgagaacagcuccgacaaguggaaguucuucgagauguucaagggcaacagccaguccgacuucagcaaccgccggacccucacguccagcaaccgccugguggggaugcugaaguacggcgggcggguguggaccuuccacggcgagacgccccgcgccaccaccgacuccagcuccaccgcggaccucaacaacaucagcaucaucauccacuccgaguucuacaucaucccccggagccaggagagcaagugcaacgaguacaucaacaacgggcugugaggacuaguuauaagacugacuagcccgaugggccucccaacgggcccuccuccccuccuugcaccgagauuaauaaaaaaaaaaaaaaaaaaaaaaaaaaaaaaaaaaaaaaaaaaaaaaaaaaaaaaaaaaaaaaaaaaaaaaaaaaaaaaaaaaaaaaaaaaaaaaaaaaaa

SEQ ID NO: 1001 - RNA, 783 nt, Artificial Sequence
  mRNA product Design i-3 (A100) comprising derived and/or modified sequence from RVA/DS-1/P[4]__CAD62680.1__SP-IgE_P2_VP8*(65-223) (opt1)
aggagaaagcuuaccauggacuggaccuggauccuguuccucguggccgccgcgacccgcguccacagccaguacaucaaggccaacuccaaguucaucggcaucacggagcuggggagcggcuccgggcuggacggccccuaccagccgaccaccuucaagccgcccaacgacuacuggcuccugaucagcuccaacaccaacggggugguguacgagagcacgaacaacaacgacuucuggaccgccgucuccagcguggagccccacgugucccagaccaaccggcaguacauccuguucggcgagaacaagcaguucaacgucgagaacaacagcgacaaguggaaguucuucgagaccuucacgggcuccagccaggggaacuucuccaaccgccggacccucaccagcuccaaccgccuggugggcaugcugaaguacgggggccggguguggaccuuccacggggagacgccccgcgccaccaccgacagcuccaacaccgccgaccucaacaacaucagcaucaucauccacuccgaguucuacaucaucccccggagccaggagagcaagugcaacgaguacaucaacaacggccugugaggacuaguuauaagacugacuagcccgaugggccucccaacgggcccuccuccccuccuugcaccgagauuaauaaaaaaaaaaaaaaaaaaaaaaaaaaaaaaaaaaaaaaaaaaaaaaaaaaaaaaaaaaaaaaaaaaaaaaaaaaaaaaaaaaaaaaaaaaaaaaaaaaaa

SEQ ID NO: 1002 - RNA, 783 nt, Artificial Sequence; identical to SEQ ID NO: 1001
  mRNA product Design i-3 (A100) comprising derived and/or modified sequence from RVA/DS-1/P[4]__ABV53252.1__SP-IgE_P2_VP8*(65-223) (opt1)

SEQ ID NO: 1003 - RNA, 783 nt, Artificial Sequence
  mRNA product Design i-3 (A100) comprising derived and/or modified sequence from RVA/F01322/P[6]__AFA51886.1__SP-IgE_P2_VP8*(65-223) (opt1)
aggagaaagcuuaccauggacuggaccuggauccuguuccucguggccgccgcgacccgcguccacagccaguacaucaaggccaacuccaaguucaucggcaucacggagcuggggagcggcuccgggcuggacggccccuaccagccgaccaacuucaagccgcccaacgacuacuggauccuccugaaccccaccaaccagcaggucgugcuggaggggaccaacaagacggacaucuggguggcccuccugcugguggagcccaacgugaccaaccagagccggcaguacacccucuucggcgagaccaagcagaucacggucgagaacaacaccaacaaguggaaguucuucgagauguuccgcuccagcguguccgccgaguuccagcacaagcggacccugaccagcgacacgaagcuggccggcuucaugaaguucuacaacuccguguggaccuuccacggggagacccccaacgcgaccacggacuacagcuccaccagcaaccucuucgaggucgagaccgugauccacguggaguucuacaucaucccccgcucccaggagagcaagugcuccgaguacaucaacaccggccugugaggacuaguuauaagacugacuagcccgaugggccucccaacgggcccuccuccccuccuugcaccgagauuaauaaaaaaaaaaaaaaaaaaaaaaaaaaaaaaaaaaaaaaaaaaaaaaaaaaaaaaaaaaaaaaaaaaaaaaaaaaaaaaaaaaaaaaaaaaaaaaaaaaaa

SEQ ID NO: 1004 - RNA, 783 nt, Artificial Sequence
  mRNA product Design i-3 (A100) comprising derived and/or modified sequence from RVA/1076/P[6]__AAA47337.1__SP-IgE_P2_VP8*(65-223) (opt1)
aggagaaagcuuaccauggacuggaccuggauccuguuccucguggccgccgcgacccgcguccacagccaguacaucaaggccaacuccaaguucaucggcaucacggagcuggggagcggcuccgggcuggacggccccuaccagccgaccagcuucaagccgcccuccgacuacuggauccuccugaaccccaccaaccagcaggucgugcuggaggggaccaacaagacggacaucuggguggcccuccugcugguggagcccaacgugaccaaccagagccggcaguacacccucuucggcgagaccaagcagaucacggucgagaacaacaccaacaaguggaaguucuucgagauguuccgcuccagcguguccgccgaguuccagcacaagcggacccugaccagcgacacgaagcuggccggcuuccucaaguucuacaacuccguguggaccuucuacggggagacgccccacgcgaccaccgacuacagcuccaccagcaaccuguccgaggucgagaccgccauccacguggaguucuacaucaucccccgcagccaggaguccaagugcaacgaguacaucaacaccggccugugaggacuaguuauaagacugacuagcccgaugggccucccaacgggcccuccuccccuccuugcaccgagauuaauaaaaaaaaaaaaaaaaaaaaaaaaaaaaaaaaaaaaaaaaaaaaaaaaaaaaaaaaaaaaaaaaaaaaaaaaaaaaaaaaaaaaaaaaaaaaaaaaaaaa

SEQ ID NO: 1005 - RNA, 783 nt, Artificial Sequence
  mRNA product Design i-3 (A100) comprising derived and/or modified sequence from RVA/BE1128/P[8]__AEX30671.1__SP-IgE_P2_VP8*(65-223) (opt1)
aggagaaagcuuaccauggacuggaccuggauccuguuccucguggccgccgcgacccgcguccacagccaguacaucaaggccaacuccaaguucaucggcaucacggagcuggggagcggcuccgggcuggacggccccuaccagccgaccaccuucaccccgcccacggacuacuggauccucaucaccagcaacaccaacggggugguguacgaguccaccaacaacagcgacuucuggacggccgucaucgccguggagccccacgugaaccccgucgaccggcaguacaacguguucggcgagaacaagcaguucaacgugcgcaacgacuccgacaaguggaaguuccuggagauguuccggggcagcucccagaacgacuucuacaaccgccggacccugaccagcgacacccgccucgucgggauccugaaguacggcgggcggguguggacguuccacggcgagacgccccgcgccaccaccgacuccagcaacaccgcgaaccuggacgggaucuccaucaccauccacagcgaguucuacaucaucccccggucccaggagagcaagugcaacgaguacaucaacaacggccucugaggacuaguuauaagacugacuagcccgaugggccucccaacgggcccuccuccccuccuugcaccgagauuaauaaaaaaaaaaaaaaaaaaaaaaaaaaaaaaaaaaaaaaaaaaaaaaaaaaaaaaaaaaaaaaaaaaaaaaaaaaaaaaaaaaaaaaaaaaaaaaaaaaaa

SEQ ID NO: 1006 - RNA, 783 nt, Artificial Sequence
  mRNA product Design i-3 (A100) comprising derived and/or modified sequence from RVA/Wa-VirWa/P[8]__ACR22783.1__SP-IgE_P2_VP8*(65-223) (opt1)
aggagaaagcuuaccauggacuggaccuggauccuguuccucguggccgccgcgacccgcguccacagccaguacaucaaggccaacuccaaguucaucggcaucacggagcuggggagcggcuccgggcuggacggccccuaccagccgaccaccuucaccccgcccaacgacuacuggauccucaucaacagcaacacgaacggggugguguacgaguccaccaacaacagcgacuucuggaccgccgucguggccaucgagccccacgugaaccccgucgaccggcaguacaccaucuucggcgaguccaagcaguucaacgugcgcaacgacagcaacaaguggaaguuccuggagauguuccgguccagcucccagaacgaguucuacaaccgccggacgcugaccagcgacacccgccucgugggcauccugaaguacgggggccgggucuggaccuuccacggggagacgccccgcgccaccaccgacuccagcuccaccgcgaaccugaacaacaucagcaucacgauccacuccgaguucuacaucaucccccggagccaggaguccaagugcaacgaguacaucaacaacggccucugaggacuaguuauaagacugacuagcccgaugggccucccaacgggcccuccuccccuccuugcaccgagauuaauaaaaaaaaaaaaaaaaaaaaaaaaaaaaaaaaaaaaaaaaaaaaaaaaaaaaaaaaaaaaaaaaaaaaaaaaaaaaaaaaaaaaaaaaaaaaaaaaaaaa

SEQ ID NO: 1007 - RNA, 783 nt, Artificial Sequence
  mRNA product Design i-3 (A100) comprising derived and/or modified sequence from RVA/Wa/P[8]__AAA47290.1__SP-IgE_P2_VP8*(65-223) (opt1)
aggagaaagcuuaccauggacuggaccuggauccuguuccucguggccgccgcgacccgcguccacagccaguacaucaaggccaacuccaaguucaucggcaucacggagcuggggagcggcuccgggcuggacggccccuaccagccgaccaccuucaccccgcccaacgacuacuggauccucaucaacagcaacacgaacggggugguguacgaguccaccaacaacagcgacuucuggaccgccgucguggccaucgagccccacgugaaccccgucgaccggcaguacaccaucuucggcgaguccaagcaguucaacgugagcaacgacuccaacaaguggaaguuccuggagauguuccgcagcuccagccagaacgaguucuacaaccggcgcacgcugaccuccgacacccgguucgugggcauccucaaguacgggggccgcgucuggaccuuccacggggagacgccccgggccaccaccgacagcuccagcaccgcgaaccugaacaacaucuccaucacgauccacagcgaguucuacaucaucccccgcucccaggagagcaagugcaacgaguacaucaacaacggccugugaggacuaguuauaagacugacuagcccgaugggccucccaacgggcccuccuccccuccuugcaccgagauuaauaaaaaaaaaaaaaaaaaaaaaaaaaaaaaaaaaaaaaaaaaaaaaaaaaaaaaaaaaaaaaaaaaaaaaaaaaaaaaaaaaaaaaaaaaaaaaaaaaaaa

SEQ ID NO: 1008 - RNA, 783 nt, Artificial Sequence; identical to SEQ ID NO: 1007
  mRNA product Design i-3 (A100) comprising derived and/or modified sequence from RVA/Wa/P[8]__AAA66953.1__SP-IgE_P2_VP8*(65-223) (opt1)

SEQ ID NO: 1009 - RNA, 855 nt, Artificial Sequence
  mRNA product Design i-3 (A100) comprising derived and/or modified sequence from RVA/BE1058/P[4]__AEX30665.1__SP-IgE_P2_VP8*(41-223) (opt1)
aggagaaagcuuaccauggacuggaccuggauccuguuccucguggccgccgcgacccgcguccacagccaguacaucaaggccaacuccaaguucaucggcaucacggagcuggggagcggcuccggggcccagacccgguacgcccccgugaacuggggccacggggagaucaacgacagcaccaccguggagccgguccuggacggccccuaccagcccacgaccuucaagcccccgaacgacuacuggcuccugaucuccagcaacaccgacggcgugguguacgaguccaccaacaacagcgacuucuggacggccgucaucgcgguggagccccacgugaaccagaccaaccgccaguacguccuguucggggagaacaagcaguucaacaucgagaacuccagcgacaaguggaaguucuucgagauguucaagggcaacucccagagcgacuucuccaaccggcgcacccucaccagcuccaaccggcugguggggaugcugaaguacggcgggcgcguguggacguuccacggcgagacgccccgggccaccaccgacagcuccagcaccgccgaccucaacaacaucuccaucaucauccacagcgaguucuacaucaucccccgcagccaggaguccaagugcaacgaguacaucaacaacggccugugaggacuaguuauaagacugacuagcccgaugggccucccaacgggcccuccuccccuccuugcaccgagauuaauaaaaaaaaaaaaaaaaaaaaaaaaaaaaaaaaaaaaaaaaaaaaaaaaaaaaaaaaaaaaaaaaaaaaaaaaaaaaaaaaaaaaaaaaaaaaaaaaaaaa

SEQ ID NO: 1010 - RNA, 855 nt, Artificial Sequence
  mRNA product Design i-3 (A100) comprising derived and/or modified sequence from RVA/DS-1/P[4]__CAD62680.1__SP-IgE_P2_VP8*(41-223) (opt1)
aggagaaagcuuaccauggacuggaccuggauccuguuccucguggccgccgcgacccgcguccacagccaguacaucaaggccaacuccaaguucaucggcaucacggagcuggggagcggcuccggggcccagacccgguacgcccccgugaacuggggcagcugggagaucaacgacuccaccaccguggagccgguccuggacgggcccuaccagcccacgaccuucaagcccccgaacgacuacuggcuccugaucagcuccaacaccaacggcgugguguacgagagcaccaacaacaacgacuucuggacggccgucuccagcguggagccccacgugucccagaccaaccgccaguacauccuguucggcgagaacaagcaguucaacgucgagaacaacagcgacaaguggaaguucuucgagaccuucaccggguccagccagggcaacuucuccaaccggcgcacgcucaccagcuccaaccggcugguggggaugcugaaguacggcgggcgcguguggaccuuccacggcgagacgccccgggcgaccaccgacagcuccaacaccgccgaccucaacaacaucagcaucaucauccacagcgaguucuacaucaucccccgcucccaggagagcaagugcaacgaguacaucaacaacggccugugaggacuaguuauaagacugacuagcccgaugggccucccaacgggcccuccuccccuccuugcaccgagauuaauaaaaaaaaaaaaaaaaaaaaaaaaaaaaaaaaaaaaaaaaaaaaaaaaaaaaaaaaaaaaaaaaaaaaaaaaaaaaaaaaaaaaaaaaaaaaaaaaaaaa

SEQ ID NO: 1011 - RNA, 855 nt, Artificial Sequence; identical to SEQ ID NO: 1010
  mRNA product Design i-3 (A100) comprising derived and/or modified sequence from RVA/DS-1/P[4]__ABV53252.1__SP-IgE_P2_VP8*(41-223) (opt1)

SEQ ID NO: 1012 - RNA, 855 nt, Artificial Sequence
  mRNA product Design i-3 (A100) comprising derived and/or modified sequence from RVA/F01322/P[6]__AFA51886.1__SP-IgE_P2_VP8*(41-223) (opt1)
aggagaaagcuuaccauggacuggaccuggauccuguuccucguggccgccgcgacccgcguccacagccaguacaucaaggccaacuccaaguucaucggcaucacggagcuggggagcggcuccggggcccagaccaacuacgcccccgugaccuggagccacggcgaggugaacgacuccaccacgaucgagccgguccuggacgggcccuaccagcccaccaacuucaagcccccgaacgacuacuggauccuccugaaccccaccaaccagcaggucgugcuggagggcaccaacaagacggacaucuggguggcccuccugcugguggagcccaacgugaccaaccagagccggcaguacacccucuucggcgagaccaagcagaucacggucgagaacaacaccaacaaguggaaguucuucgagauguuccgcuccagcguguccgcggaguuccagcacaagcggacccugaccagcgacacgaagcuggccggguucaugaaguucuacaacuccguguggaccuuccacggcgagacccccaacgccaccacggacuacagcuccaccagcaaccucuucgaggucgagaccgugauccacguggaguucuacaucaucccgcgcucccaggagagcaagugcuccgaguacaucaacaccgggcugugaggacuaguuauaagacugacuagcccgaugggccucccaacgggcccuccuccccuccuugcaccgagauuaauaaaaaaaaaaaaaaaaaaaaaaaaaaaaaaaaaaaaaaaaaaaaaaaaaaaaaaaaaaaaaaaaaaaaaaaaaaaaaaaaaaaaaaaaaaaaaaaaaaaa

SEQ ID NO: 1013 - RNA, 855 nt, Artificial Sequence
  mRNA product Design i-3 (A100) comprising derived and/or modified sequence from RVA/1076/P[6]__AAA47337.1__SP-IgE_P2_VP8*(41-223) (opt1)
aggagaaagcuuaccauggacuggaccuggauccuguuccucguggccgccgcgacccgcguccacagccaguacaucaaggccaacuccaaguucaucggcaucacggagcuggggagcggcuccggggcccagaccaacuacgcccccgugaccuggagccacggcgaggugaacgacuccaccacgaucgagccgguccuggacgggcccuaccagcccaccagcuucaagcccccguccgacuacuggauccuccugaaccccaccaaccagcaggucgugcuggagggcaccaacaagacggacaucuggguggcccuccugcugguggagcccaacgugaccaaccagagccggcaguacacccucuucggcgagaccaagcagaucacggucgagaacaacaccaacaaguggaaguucuucgagauguuccgcuccagcguguccgcggaguuccagcacaagcggacccugaccagcgacacgaagcuggccggguuccucaaguucuacaacuccguguggaccuucuacggcgagacgccccacgccaccaccgacuacagcuccaccagcaaccuguccgaggucgagaccgccauccacguggaguucuacaucaucccgcgcagccaggaguccaagugcaacgaguacaucaacaccgggcugugaggacuaguuauaagacugacuagcccgaugggccucccaacgggcccuccuccccuccuugcaccgagauuaauaaaaaaaaaaaaaaaaaaaaaaaaaaaaaaaaaaaaaaaaaaaaaaaaaaaaaaaaaaaaaaaaaaaaaaaaaaaaaaaaaaaaaaaaaaaaaaaaaaaa

SEQ ID NO: 1014 - RNA, 855 nt, Artificial Sequence
  mRNA product Design i-3 (A100) comprising derived and/or modified sequence from RVA/BE1128/P[8]__AEX30671.1__SP-IgE_P2_VP8*(41-223) (opt1)
aggagaaagcuuaccauggacuggaccuggauccuguuccucguggccgccgcgacccgcguccacagccaguacaucaaggccaacuccaaguucaucggcaucacggagcuggggagcggcuccggggcccagacccgguacgcccccgugaacuggggccacggggagaucaacgacagcaccaccguggagccgauccuggacggccccuaccagcccacgaccuucacgcccccgaccgacuacuggauccucaucaccuccaacaccaacggcgucguguacgagagcaccaacaacuccgacuucuggaccgccgugaucgcggucgagccccacgugaaccccguggaccgccaguacaacgucuucggggagaacaagcaguucaacgugcggaacgacagcgacaaguggaaguuccuggagauguuccgcggcuccagccagaacgacuucuacaaccggcgcacgcugaccuccgacacccggcucguggggauccugaaguacggcgggcgcgucuggaccuuccacggcgagacgccccgggccaccaccgacagcuccaacaccgccaaccuggacggcaucagcaucacgauccacuccgaguucuacaucaucccgcgcagccaggaguccaagugcaacgaguacaucaacaacgggcucugaggacuaguuauaagacugacuagcccgaugggccucccaacgggcccuccuccccuccuugcaccgagauuaauaaaaaaaaaaaaaaaaaaaaaaaaaaaaaaaaaaaaaaaaaaaaaaaaaaaaaaaaaaaaaaaaaaaaaaaaaaaaaaaaaaaaaaaaaaaaaaaaaaaa

SEQ ID NO: 1015 - RNA, 855 nt, Artificial Sequence
  mRNA product Design i-3 (A100) comprising derived and/or modified sequence from RVA/Wa-VirWa/P[8]__ACR22783.1__SP-IgE_P2_VP8*(41-223) (opt1)
aggagaaagcuuaccauggacuggaccuggauccuguuccucguggccgccgcgacccgcguccacagccaguacaucaaggccaacuccaaguucaucggcaucacggagcuggggagcggcuccggggcccagacccgguacgcccccgugaacuggggccacggggagaucaacgacagcaccaccguggagccgauccuggacggccccuaccagcccacgaccuucacgcccccgaacgacuacuggauccucaucaacuccaacaccaacggcgucguguacgagagcaccaacaacuccgacuucuggaccgccguggucgcgaucgagccccacgugaaccccguggaccgccaguacaccaucuucggggagagcaagcaguucaacguccggaacgacuccaacaaguggaaguuccuggagauguuccgcagcuccagccagaacgaguucuacaaccggcgcacccugacguccgacacccggcucgugggcauccugaaguacgggggccgcguguggaccuuccacggggagacgccccgggccaccaccgacagcuccagcaccgccaaccugaacaacaucuccaucaccauccacagcgaguucuacaucaucccgcgcucccaggagagcaagugcaacgaguacaucaacaacggccucugaggacuaguuauaagacugacuagcccgaugggccucccaacgggcccuccuccccuccuugcaccgagauuaauaaaaaaaaaaaaaaaaaaaaaaaaaaaaaaaaaaaaaaaaaaaaaaaaaaaaaaaaaaaaaaaaaaaaaaaaaaaaaaaaaaaaaaaaaaaaaaaaaaaa

SEQ ID NO: 1016 - RNA, 855 nt, Artificial Sequence
  mRNA product Design i-3 (A100) comprising derived and/or modified sequence from RVA/Wa/P[8]__AAA47290.1__SP-IgE_P2_VP8*(41-223) (opt1)
aggagaaagcuuaccauggacuggaccuggauccuguuccucguggccgccgcgacccgcguccacagccaguacaucaaggccaacuccaaguucaucggcaucacggagcuggggagcggcuccggggcccagacccgguacgcccccgugaacuggggccacggggagaucaacgacagcaccaccguggagccgauccuggacggccccuaccagcccacgaccuucacgcccccgaacgacuacuggauccucaucaacuccaacaccaacggcgucguguacgagagcaccaacaacuccgacuucuggaccgccguggucgcgaucgagccccacgugaaccccguggaccgccaguacaccaucuucggggagagcaagcaguucaacgucuccaacgacagcaacaaguggaaguuccuggagauguuccgguccagcucccagaacgaguucuacaaccgccggacccugacgagcgacacccgcuucgugggcauccucaaguacgggggccggguguggaccuuccacggggagacgccccgcgccaccaccgacuccagcuccaccgccaaccugaacaacaucagcaucaccauccacuccgaguucuacaucaucccgcggagccaggagagcaagugcaacgaguacaucaacaacggccugugaggacuaguuauaagacugacuagcccgaugggccucccaacgggcccuccuccccuccuugcaccgagauuaauaaaaaaaaaaaaaaaaaaaaaaaaaaaaaaaaaaaaaaaaaaaaaaaaaaaaaaaaaaaaaaaaaaaaaaaaaaaaaaaaaaaaaaaaaaaaaaaaaaaa

SEQ ID NO: 1017 - RNA, 855 nt, Artificial Sequence
  mRNA product Design i-3 (A100) comprising derived and/or modified sequence from RVA/Wa/P[8]__AAA66953.1__SP-IgE_P2_VP8*(41-223) (opt1)
aggagaaagcuuaccauggacuggaccuggauccuguuccucguggccgccgcgacccgcguccacagccaguacaucaaggccaacuccaaguucaucggcaucacggagcuggggagcggcuccggggcccagacccgguacgcccccgugaacuggggccacggggagaucaacgacagcaccaccguggagccgaugcuggacggccccuaccagcccacgaccuucacgcccccgaacgacuacuggauccucaucaacuccaacaccaacggcgucguguacgagagcaccaacaacuccgacuucuggaccgccguggucgcgaucgagccccacgugaaccccguggaccgccaguacaccaucuucggggagagcaagcaguucaacgucuccaacgacagcaacaaguggaaguuccuggagauguuccgguccagcucccagaacgaguucuacaaccgccggacccugacgagcgacacccgcuucgugggcauccucaaguacgggggccggguguggaccuuccacggggagacgccccgcgccaccaccgacuccagcuccaccgccaaccugaacaacaucagcaucaccauccacuccgaguucuacaucaucccgcggagccaggagagcaagugcaacgaguacaucaacaacggccugugaggacuaguuauaagacugacuagcccgaugggccucccaacgggcccuccuccccuccuugcaccgagauuaauaaaaaaaaaaaaaaaaaaaaaaaaaaaaaaaaaaaaaaaaaaaaaaaaaaaaaaaaaaaaaaaaaaaaaaaaaaaaaaaaaaaaaaaaaaaaaaaaaaaa

SEQ ID NO: 1018 - RNA, 732 nt, Artificial Sequence
  mRNA product Design i-3 (A100) comprising derived and/or modified sequence from RVA/BE1058/P[4]__AEX30665.1__P2_VP8*(65-223) (opt4)
aggagaaagcuuaccaugcaguacaucaaggccaacagcaaguucaucggcaucaccgagcugggcagcggcagcggccuggacggccccuaccagcccaccaccuucaagccccccaacgacuacuggcugcugaucagcagcaacaccgacggcgugguguacgagagcaccaacaacagcgacuucuggaccgccgugaucgccguggagccccacgugaaccagaccaacagacaguacgugcuguucggcgagaacaagcaguucaacaucgagaacagcagcgacaaguggaaguucuucgagauguucaagggcaacagccagagcgacuucagcaacagaagaacccugaccagcagcaacagacuggugggcaugcugaaguacggcggcagaguguggaccuuccacggcgagacccccagagccaccaccgacagcagcagcaccgccgaccugaacaacaucagcaucaucauccacagcgaguucuacaucauccccagaagccaggagagcaagugcaacgaguacaucaacaacggccugugaggacuaguuauaagacugacuagcccgaugggccucccaacgggcccuccuccccuccuugcaccgagauuaauaaaaaaaaaaaaaaaaaaaaaaaaaaaaaaaaaaaaaaaaaaaaaaaaaaaaaaaaaaaaaaaaaaaaaaaaaaaaaaaaaaaaaaaaaaaaaaaaaaaa

SEQ ID NO: 1019 - RNA, 732 nt, Artificial Sequence
  mRNA product Design i-3 (A100) comprising derived and/or modified sequence from RVA/DS-1/P[4]__CAD62680.1__P2_VP8*(65-223) (opt4)
aggagaaagcuuaccaugcaguacaucaaggccaacagcaaguucaucggcaucaccgagcugggcagcggcagcggccuggacggccccuaccagcccaccaccuucaagccccccaacgacuacuggcugcugaucagcagcaacaccaacggcgugguguacgagagcaccaacaacaacgacuucuggaccgccgugagcagcguggagccccacgugagccagaccaacagacaguacauccuguucggcgagaacaagcaguucaacguggagaacaacagcgacaaguggaaguucuucgagaccuucaccggcagcagccagggcaacuucagcaacagaagaacccugaccagcagcaacagacuggugggcaugcugaaguacggcggcagaguguggaccuuccacggcgagacccccagagccaccaccgacagcagcaacaccgccgaccugaacaacaucagcaucaucauccacagcgaguucuacaucauccccagaagccaggagagcaagugcaacgaguacaucaacaacggccugugaggacuaguuauaagacugacuagcccgaugggccucccaacgggcccuccuccccuccuugcaccgagauuaauaaaaaaaaaaaaaaaaaaaaaaaaaaaaaaaaaaaaaaaaaaaaaaaaaaaaaaaaaaaaaaaaaaaaaaaaaaaaaaaaaaaaaaaaaaaaaaaaaaaa

SEQ ID NO: 1020 - RNA, 732 nt, Artificial Sequence; identical to SEQ ID NO: 1019
  mRNA product Design i-3 (A100) comprising derived and/or modified sequence from RVA/DS-1/P[4]__ABV53252.1__P2_VP8*(65-223) (opt4)

SEQ ID NO: 1021 - RNA, 732 nt, Artificial Sequence
  mRNA product Design i-3 (A100) comprising derived and/or modified sequence from RVA/F01322/P[6]__AFA51886.1__P2_VP8*(65-223) (opt4)
aggagaaagcuuaccaugcaguacaucaaggccaacagcaaguucaucggcaucaccgagcugggcagcggcagcggccuggacggccccuaccagcccaccaacuucaagccccccaacgacuacuggauccugcugaaccccaccaaccagcagguggugcuggagggcaccaacaagaccgacaucuggguggcccugcugcugguggagcccaacgugaccaaccagagcagacaguacacccuguucggcgagaccaagcagaucaccguggagaacaacaccaacaaguggaaguucuucgagauguucagaagcagcgugagcgccgaguuccagcacaagagaacccugaccagcgacaccaagcuggccggcuucaugaaguucuacaacagcguguggaccuuccacggcgagacccccaacgccaccaccgacuacagcagcaccagcaaccuguucgagguggagaccgugauccacguggaguucuacaucauccccagaagccaggagagcaagugcagcgaguacaucaacaccggccugugaggacuaguuauaagacugacuagcccgaugggccucccaacgggcccuccuccccuccuugcaccgagauuaauaaaaaaaaaaaaaaaaaaaaaaaaaaaaaaaaaaaaaaaaaaaaaaaaaaaaaaaaaaaaaaaaaaaaaaaaaaaaaaaaaaaaaaaaaaaaaaaaaaaa

SEQ ID NO: 1022 - RNA, 732 nt, Artificial Sequence
  mRNA product Design i-3 (A100) comprising derived and/or modified sequence from RVA/1076/P[6]__AAA47337.1__P2_VP8*(65-223) (opt4)
aggagaaagcuuaccaugcaguacaucaaggccaacagcaaguucaucggcaucaccgagcugggcagcggcagcggccuggacggccccuaccagcccaccagcuucaagccccccagcgacuacuggauccugcugaaccccaccaaccagcagguggugcuggagggcaccaacaagaccgacaucuggguggcccugcugcugguggagcccaacgugaccaaccagagcagacaguacacccuguucggcgagaccaagcagaucaccguggagaacaacaccaacaaguggaaguucuucgagauguucagaagcagcgugagcgccgaguuccagcacaagagaacccugaccagcgacaccaagcuggccggcuuccugaaguucuacaacagcguguggaccuucuacggcgagaccccccacgccaccaccgacuacagcagcaccagcaaccugagcgagguggagaccgccauccacguggaguucuacaucauccccagaagccaggagagcaagugcaacgaguacaucaacaccggccugugaggacuaguuauaagacugacuagcccgaugggccucccaacgggcccuccuccccuccuugcaccgagauuaauaaaaaaaaaaaaaaaaaaaaaaaaaaaaaaaaaaaaaaaaaaaaaaaaaaaaaaaaaaaaaaaaaaaaaaaaaaaaaaaaaaaaaaaaaaaaaaaaaaaa

SEQ ID NO: 1023 - RNA, 732 nt, Artificial Sequence
  mRNA product Design i-3 (A100) comprising derived and/or modified sequence from RVA/BE1128/P[8]__AEX30671.1__P2_VP8*(65-223) (opt4)
aggagaaagcuuaccaugcaguacaucaaggccaacagcaaguucaucggcaucaccgagcugggcagcggcagcggccuggacggccccuaccagcccaccaccuucaccccccccaccgacuacuggauccugaucaccagcaacaccaacggcgugguguacgagagcaccaacaacagcgacuucuggaccgccgugaucgccguggagccccacgugaaccccguggacagacaguacaacguguucggcgagaacaagcaguucaacgugagaaacgacagcgacaaguggaaguuccuggagauguucagaggcagcagccagaacgacuucuacaacagaagaacccugaccagcgacaccagacuggugggcauccugaaguacggcggcagaguguggaccuuccacggcgagacccccagagccaccaccgacagcagcaacaccgccaaccuggacggcaucagcaucaccauccacagcgaguucuacaucauccccagaagccaggagagcaagugcaacgaguacaucaacaacggccugugaggacuaguuauaagacugacuagcccgaugggccucccaacgggcccuccuccccuccuugcaccgagauuaauaaaaaaaaaaaaaaaaaaaaaaaaaaaaaaaaaaaaaaaaaaaaaaaaaaaaaaaaaaaaaaaaaaaaaaaaaaaaaaaaaaaaaaaaaaaaaaaaaaaa

SEQ ID NO: 1024 - RNA, 732 nt, Artificial Sequence
  mRNA product Design i-3 (A100) comprising derived and/or modified sequence from RVA/Wa-VirWa/P[8]__ACR22783.1__P2_VP8*(65-223) (opt4)
aggagaaagcuuaccaugcaguacaucaaggccaacagcaaguucaucggcaucaccgagcugggcagcggcagcggccuggacggccccuaccagcccaccaccuucaccccccccaacgacuacuggauccugaucaacagcaacaccaacggcgugguguacgagagcaccaacaacagcgacuucuggaccgccgugguggccaucgagccccacgugaaccccguggacagacaguacaccaucuucggcgagagcaagcaguucaacgugagaaacgacagcaacaaguggaaguuccuggagauguucagaagcagcagccagaacgaguucuacaacagaagaacccugaccagcgacaccagacuggugggcauccugaaguacggcggcagaguguggaccuuccacggcgagacccccagagccaccaccgacagcagcagcaccgccaaccugaacaacaucagcaucaccauccacagcgaguucuacaucauccccagaagccaggagagcaagugcaacgaguacaucaacaacggccugugaggacuaguuauaagacugacuagcccgaugggccucccaacgggcccuccuccccuccuugcaccgagauuaauaaaaaaaaaaaaaaaaaaaaaaaaaaaaaaaaaaaaaaaaaaaaaaaaaaaaaaaaaaaaaaaaaaaaaaaaaaaaaaaaaaaaaaaaaaaaaaaaaaaa

SEQ ID NO: 1025 - RNA, 732 nt, Artificial Sequence
  mRNA product Design i-3 (A100) comprising derived and/or modified sequence from RVA/Wa/P[8]__AAA47290.1__P2_VP8*(65-223) (opt4)
aggagaaagcuuaccaugcaguacaucaaggccaacagcaaguucaucggcaucaccgagcugggcagcggcagcggccuggacggccccuaccagcccaccaccuucaccccccccaacgacuacuggauccugaucaacagcaacaccaacggcgugguguacgagagcaccaacaacagcgacuucuggaccgccgugguggccaucgagccccacgugaaccccguggacagacaguacaccaucuucggcgagagcaagcaguucaacgugagcaacgacagcaacaaguggaaguuccuggagauguucagaagcagcagccagaacgaguucuacaacagaagaacccugaccagcgacaccagauucgugggcauccugaaguacggcggcagaguguggaccuuccacggcgagacccccagagccaccaccgacagcagcagcaccgccaaccugaacaacaucagcaucaccauccacagcgaguucuacaucauccccagaagccaggagagcaagugcaacgaguacaucaacaacggccugugaggacuaguuauaagacugacuagcccgaugggccucccaacgggcccuccuccccuccuugcaccgagauuaauaaaaaaaaaaaaaaaaaaaaaaaaaaaaaaaaaaaaaaaaaaaaaaaaaaaaaaaaaaaaaaaaaaaaaaaaaaaaaaaaaaaaaaaaaaaaaaaaaaaa

SEQ ID NO: 1026 - RNA, 732 nt, Artificial Sequence; identical to SEQ ID NO: 1025
  mRNA product Design i-3 (A100) comprising derived and/or modified sequence from RVA/Wa/P[8]__AAA66953.1__P2_VP8*(65-223) (opt4)

SEQ ID NO: 1027 - RNA, 804 nt, Artificial Sequence
  mRNA product Design i-3 (A100) comprising derived and/or modified sequence from RVA/BE1058/P[4]__AEX30665.1__P2_VP8*(41-223) (opt4)
aggagaaagcuuaccaugcaguacaucaaggccaacagcaaguucaucggcaucaccgagcugggcagcggcagcggcgcccagaccagauacgcccccgugaacuggggccacggcgagaucaacgacagcaccaccguggagcccgugcuggacggccccuaccagcccaccaccuucaagccccccaacgacuacuggcugcugaucagcagcaacaccgacggcgugguguacgagagcaccaacaacagcgacuucuggaccgccgugaucgccguggagccccacgugaaccagaccaacagacaguacgugcuguucggcgagaacaagcaguucaacaucgagaacagcagcgacaaguggaaguucuucgagauguucaagggcaacagccagagcgacuucagcaacagaagaacccugaccagcagcaacagacuggugggcaugcugaaguacggcggcagaguguggaccuuccacggcgagacccccagagccaccaccgacagcagcagcaccgccgaccugaacaacaucagcaucaucauccacagcgaguucuacaucauccccagaagccaggagagcaagugcaacgaguacaucaacaacggccugugaggacuaguuauaagacugacuagcccgaugggccucccaacgggcccuccuccccuccuugcaccgagauuaauaaaaaaaaaaaaaaaaaaaaaaaaaaaaaaaaaaaaaaaaaaaaaaaaaaaaaaaaaaaaaaaaaaaaaaaaaaaaaaaaaaaaaaaaaaaaaaaaaaaa

SEQ ID NO: 1028 - RNA, 804 nt, Artificial Sequence
  mRNA product Design i-3 (A100) comprising derived and/or modified sequence from RVA/DS-1/P[4]__CAD62680.1__P2_VP8*(41-223) (opt4)
aggagaaagcuuaccaugcaguacaucaaggccaacagcaaguucaucggcaucaccgagcugggcagcggcagcggcgcccagaccagauacgcccccgugaacuggggcagcugggagaucaacgacagcaccaccguggagcccgugcuggacggccccuaccagcccaccaccuucaagccccccaacgacuacuggcugcugaucagcagcaacaccaacggcgugguguacgagagcaccaacaacaacgacuucuggaccgccgugagcagcguggagccccacgugagccagaccaacagacaguacauccuguucggcgagaacaagcaguucaacguggagaacaacagcgacaaguggaaguucuucgagaccuucaccggcagcagccagggcaacuucagcaacagaagaacccugaccagcagcaacagacuggugggcaugcugaaguacggcggcagaguguggaccuuccacggcgagacccccagagccaccaccgacagcagcaacaccgccgaccugaacaacaucagcaucaucauccacagcgaguucuacaucauccccagaagccaggagagcaagugcaacgaguacaucaacaacggccugugaggacuaguuauaagacugacuagcccgaugggccucccaacgggcccuccuccccuccuugcaccgagauuaauaaaaaaaaaaaaaaaaaaaaaaaaaaaaaaaaaaaaaaaaaaaaaaaaaaaaaaaaaaaaaaaaaaaaaaaaaaaaaaaaaaaaaaaaaaaaaaaaaaaa

SEQ ID NO: 1029 - RNA, 804 nt, Artificial Sequence; identical to SEQ ID NO: 1028
  mRNA product Design i-3 (A100) comprising derived and/or modified sequence from RVA/DS-1/P[4]__ABV53252.1__P2_VP8*(41-223) (opt4)

SEQ ID NO: 1030 - RNA, 804 nt, Artificial Sequence
  mRNA product Design i-3 (A100) comprising derived and/or modified sequence from RVA/F01322/P[6]__AFA51886.1__P2_VP8*(41-223) (opt4)
aggagaaagcuuaccaugcaguacaucaaggccaacagcaaguucaucggcaucaccgagcugggcagcggcagcggcgcccagaccaacuacgcccccgugaccuggagccacggcgaggugaacgacagcaccaccaucgagcccgugcuggacggccccuaccagcccaccaacuucaagccccccaacgacuacuggauccugcugaaccccaccaaccagcagguggugcuggagggcaccaacaagaccgacaucuggguggcccugcugcugguggagcccaacgugaccaaccagagcagacaguacacccuguucggcgagaccaagcagaucaccguggagaacaacaccaacaaguggaaguucuucgagauguucagaagcagcgugagcgccgaguuccagcacaagagaacccugaccagcgacaccaagcuggccggcuucaugaaguucuacaacagcguguggaccuuccacggcgagacccccaacgccaccaccgacuacagcagcaccagcaaccuguucgagguggagaccgugauccacguggaguucuacaucauccccagaagccaggagagcaagugcagcgaguacaucaacaccggccugugaggacuaguuauaagacugacuagcccgaugggccucccaacgggcccuccuccccuccuugcaccgagauuaauaaaaaaaaaaaaaaaaaaaaaaaaaaaaaaaaaaaaaaaaaaaaaaaaaaaaaaaaaaaaaaaaaaaaaaaaaaaaaaaaaaaaaaaaaaaaaaaaaaaa

SEQ ID NO: 1031 - RNA, 804 nt, Artificial Sequence
  mRNA product Design i-3 (A100) comprising derived and/or modified sequence from RVA/1076/P[6]__AAA47337.1__P2_VP8*(41-223) (opt4)
aggagaaagcuuaccaugcaguacaucaaggccaacagcaaguucaucggcaucaccgagcugggcagcggcagcggcgcccagaccaacuacgcccccgugaccuggagccacggcgaggugaacgacagcaccaccaucgagcccgugcuggacggccccuaccagcccaccagcuucaagccccccagcgacuacuggauccugcugaaccccaccaaccagcagguggugcuggagggcaccaacaagaccgacaucuggguggcccugcugcugguggagcccaacgugaccaaccagagcagacaguacacccuguucggcgagaccaagcagaucaccguggagaacaacaccaacaaguggaaguucuucgagauguucagaagcagcgugagcgccgaguuccagcacaagagaacccugaccagcgacaccaagcuggccggcuuccugaaguucuacaacagcguguggaccuucuacggcgagaccccccacgccaccaccgacuacagcagcaccagcaaccugagcgagguggagaccgccauccacguggaguucuacaucauccccagaagccaggagagcaagugcaacgaguacaucaacaccggccugugaggacuaguuauaagacugacuagcccgaugggccucccaacgggcccuccuccccuccuugcaccgagauuaauaaaaaaaaaaaaaaaaaaaaaaaaaaaaaaaaaaaaaaaaaaaaaaaaaaaaaaaaaaaaaaaaaaaaaaaaaaaaaaaaaaaaaaaaaaaaaaaaaaaa

SEQ ID NO: 1032 - RNA, 804 nt, Artificial Sequence
  mRNA product Design i-3 (A100) comprising derived and/or modified sequence from RVA/BE1128/P[8]__AEX30671.1__P2_VP8*(41-223) (opt4)
aggagaaagcuuaccaugcaguacaucaaggccaacagcaaguucaucggcaucaccgagcugggcagcggcagcggcgcccagaccagauacgcccccgugaacuggggccacggcgagaucaacgacagcaccaccguggagcccauccuggacggccccuaccagcccaccaccuucaccccccccaccgacuacuggauccugaucaccagcaacaccaacggcgugguguacgagagcaccaacaacagcgacuucuggaccgccgugaucgccguggagccccacgugaaccccguggacagacaguacaacguguucggcgagaacaagcaguucaacgugagaaacgacagcgacaaguggaaguuccuggagauguucagaggcagcagccagaacgacuucuacaacagaagaacccugaccagcgacaccagacuggugggcauccugaaguacggcggcagaguguggaccuuccacggcgagacccccagagccaccaccgacagcagcaacaccgccaaccuggacggcaucagcaucaccauccacagcgaguucuacaucauccccagaagccaggagagcaagugcaacgaguacaucaacaacggccugugaggacuaguuauaagacugacuagcccgaugggccucccaacgggcccuccuccccuccuugcaccgagauuaauaaaaaaaaaaaaaaaaaaaaaaaaaaaaaaaaaaaaaaaaaaaaaaaaaaaaaaaaaaaaaaaaaaaaaaaaaaaaaaaaaaaaaaaaaaaaaaaaaaaa

SEQ ID NO: 1033 - RNA, 804 nt, Artificial Sequence
  mRNA product Design i-3 (A100) comprising derived and/or modified sequence from RVA/Wa-VirWa/P[8]__ACR22783.1__P2_VP8*(41-223) (opt4)
aggagaaagcuuaccaugcaguacaucaaggccaacagcaaguucaucggcaucaccgagcugggcagcggcagcggcgcccagaccagauacgcccccgugaacuggggccacggcgagaucaacgacagcaccaccguggagcccauccuggacggccccuaccagcccaccaccuucaccccccccaacgacuacuggauccugaucaacagcaacaccaacggcgugguguacgagagcaccaacaacagcgacuucuggaccgccgugguggccaucgagccccacgugaaccccguggacagacaguacaccaucuucggcgagagcaagcaguucaacgugagaaacgacagcaacaaguggaaguuccuggagauguucagaagcagcagccagaacgaguucuacaacagaagaacccugaccagcgacaccagacuggugggcauccugaaguacggcggcagaguguggaccuuccacggcgagacccccagagccaccaccgacagcagcagcaccgccaaccugaacaacaucagcaucaccauccacagcgaguucuacaucauccccagaagccaggagagcaagugcaacgaguacaucaacaacggccugugaggacuaguuauaagacugacuagcccgaugggccucccaacgggcccuccuccccuccuugcaccgagauuaauaaaaaaaaaaaaaaaaaaaaaaaaaaaaaaaaaaaaaaaaaaaaaaaaaaaaaaaaaaaaaaaaaaaaaaaaaaaaaaaaaaaaaaaaaaaaaaaaaaaa

SEQ ID NO: 1034 - RNA, 804 nt, Artificial Sequence
  mRNA product Design i-3 (A100) comprising derived and/or modified sequence from RVA/Wa/P[8]__AAA47290.1__P2_VP8*(41-223) (opt4)
aggagaaagcuuaccaugcaguacaucaaggccaacagcaaguucaucggcaucaccgagcugggcagcggcagcggcgcccagaccagauacgcccccgugaacuggggccacggcgagaucaacgacagcaccaccguggagcccauccuggacggccccuaccagcccaccaccuucaccccccccaacgacuacuggauccugaucaacagcaacaccaacggcgugguguacgagagcaccaacaacagcgacuucuggaccgccgugguggccaucgagccccacgugaaccccguggacagacaguacaccaucuucggcgagagcaagcaguucaacgugagcaacgacagcaacaaguggaaguuccuggagauguucagaagcagcagccagaacgaguucuacaacagaagaacccugaccagcgacaccagauucgugggcauccugaaguacggcggcagaguguggaccuuccacggcgagacccccagagccaccaccgacagcagcagcaccgccaaccugaacaacaucagcaucaccauccacagcgaguucuacaucauccccagaagccaggagagcaagugcaacgaguacaucaacaacggccugugaggacuaguuauaagacugacuagcccgaugggccucccaacgggcccuccuccccuccuugcaccgagauuaauaaaaaaaaaaaaaaaaaaaaaaaaaaaaaaaaaaaaaaaaaaaaaaaaaaaaaaaaaaaaaaaaaaaaaaaaaaaaaaaaaaaaaaaaaaaaaaaaaaaa

SEQ ID NO: 1035 - RNA, 804 nt, Artificial Sequence
  mRNA product Design i-3 (A100) comprising derived and/or modified sequence from RVA/Wa/P[8]__AAA66953.1__P2_VP8*(41-223) (opt4)
aggagaaagcuuaccaugcaguacaucaaggccaacagcaaguucaucggcaucaccgagcugggcagcggcagcggcgcccagaccagauacgcccccgugaacuggggccacggcgagaucaacgacagcaccaccguggagcccaugcuggacggccccuaccagcccaccaccuucaccccccccaacgacuacuggauccugaucaacagcaacaccaacggcgugguguacgagagcaccaacaacagcgacuucuggaccgccgugguggccaucgagccccacgugaaccccguggacagacaguacaccaucuucggcgagagcaagcaguucaacgugagcaacgacagcaacaaguggaaguuccuggagauguucagaagcagcagccagaacgaguucuacaacagaagaacccugaccagcgacaccagauucgugggcauccugaaguacggcggcagaguguggaccuuccacggcgagacccccagagccaccaccgacagcagcagcaccgccaaccugaacaacaucagcaucaccauccacagcgaguucuacaucauccccagaagccaggagagcaagugcaacgaguacaucaacaacggccugugaggacuaguuauaagacugacuagcccgaugggccucccaacgggcccuccuccccuccuugcaccgagauuaauaaaaaaaaaaaaaaaaaaaaaaaaaaaaaaaaaaaaaaaaaaaaaaaaaaaaaaaaaaaaaaaaaaaaaaaaaaaaaaaaaaaaaaaaaaaaaaaaaaaa

SEQ ID NO: 1036 - RNA, 1230 nt, Artificial Sequence
  mRNA product Design i-3 (A100) comprising derived and/or modified sequence from RVA/BE1058/P[4]__AEX30665.1__P2_VP8*(65-223)_Ferritin (opt4)
aggagaaagcuuaccaugcaguacaucaaggccaacagcaaguucaucggcaucaccgagcugggcagcggcagcggccuggacggccccuaccagcccaccaccuucaagccccccaacgacuacuggcugcugaucagcagcaacaccgacggcgugguguacgagagcaccaacaacagcgacuucuggaccgccgugaucgccguggagccccacgugaaccagaccaacagacaguacgugcuguucggcgagaacaagcaguucaacaucgagaacagcagcgacaaguggaaguucuucgagauguucaagggcaacagccagagcgacuucagcaacagaagaacccugaccagcagcaacagacuggugggcaugcugaaguacggcggcagaguguggaccuuccacggcgagacccccagagccaccaccgacagcagcagcaccgccgaccugaacaacaucagcaucaucauccacagcgaguucuacaucauccccagaagccaggagagcaagugcaacgaguacaucaacaacggccugagcggcggcgacaucaucaagcugcugaacgagcaggugaacaaggagaugcagagcagcaaccuguacaugagcaugagcagcuggugcuacacccacagccuggacggcgccggccuguuccuguucgaccacgccgccgaggaguacgagcacgccaagaagcugaucaucuuccugaacgagaacaacgugcccgugcagcugaccagcaucagcgcccccgagcacaaguucgagggccugacccagaucuuccagaaggccuacgagcacgagcagcacaucagcgagagcaucaacaacaucguggaccacgccaucaagagcaaggaccacgccaccuucaacuuccugcagugguacguggccgagcagcacgaggaggaggugcuguucaaggacauccuggacaagaucgagcugaucggcaacgagaaccacggccuguaccuggccgaccaguacgugaagggcaucgccaagagcagaaagagcugaggacuaguuauaagacugacuagcccgaugggccucccaacgggcccuccuccccuccuugcaccgagauuaauaaaaaaaaaaaaaaaaaaaaaaaaaaaaaaaaaaaaaaaaaaaaaaaaaaaaaaaaaaaaaaaaaaaaaaaaaaaaaaaaaaaaaaaaaaaaaaaaaaaa

SEQ ID NO: 1037 - RNA, 1230 nt, Artificial Sequence
  mRNA product Design i-3 (A100) comprising derived and/or modified sequence from RVA/DS-1/P[4]__CAD62680.1__P2_VP8*(65-223)_Ferritin (opt4)
aggagaaagcuuaccaugcaguacaucaaggccaacagcaaguucaucggcaucaccgagcugggcagcggcagcggccuggacggccccuaccagcccaccaccuucaagccccccaacgacuacuggcugcugaucagcagcaacaccaacggcgugguguacgagagcaccaacaacaacgacuucuggaccgccgugagcagcguggagccccacgugagccagaccaacagacaguacauccuguucggcgagaacaagcaguucaacguggagaacaacagcgacaaguggaaguucuucgagaccuucaccggcagcagccagggcaacuucagcaacagaagaacccugaccagcagcaacagacuggugggcaugcugaaguacggcggcagaguguggaccuuccacggcgagacccccagagccaccaccgacagcagcaacaccgccgaccugaacaacaucagcaucaucauccacagcgaguucuacaucauccccagaagccaggagagcaagugcaacgaguacaucaacaacggccugagcggcggcgacaucaucaagcugcugaacgagcaggugaacaaggagaugcagagcagcaaccuguacaugagcaugagcagcuggugcuacacccacagccuggacggcgccggccuguuccuguucgaccacgccgccgaggaguacgagcacgccaagaagcugaucaucuuccugaacgagaacaacgugcccgugcagcugaccagcaucagcgcccccgagcacaaguucgagggccugacccagaucuuccagaaggccuacgagcacgagcagcacaucagcgagagcaucaacaacaucguggaccacgccaucaagagcaaggaccacgccaccuucaacuuccugcagugguacguggccgagcagcacgaggaggaggugcuguucaaggacauccuggacaagaucgagcugaucggcaacgagaaccacggccuguaccuggccgaccaguacgugaagggcaucgccaagagcagaaagagcugaggacuaguuauaagacugacuagcccgaugggccucccaacgggcccuccuccccuccuugcaccgagauuaauaaaaaaaaaaaaaaaaaaaaaaaaaaaaaaaaaaaaaaaaaaaaaaaaaaaaaaaaaaaaaaaaaaaaaaaaaaaaaaaaaaaaaaaaaaaaaaaaaaaa

SEQ ID NO: 1038 - RNA, 1230 nt, Artificial Sequence; identical to SEQ ID NO: 1037
  mRNA product Design i-3 (A100) comprising derived and/or modified sequence from RVA/DS-1/P[4]__ABV53252.1__P2_VP8*(65-223)_Ferritin (opt4)

SEQ ID NO: 1039 - RNA, 1230 nt, Artificial Sequence
  mRNA product Design i-3 (A100) comprising derived and/or modified sequence from RVA/F01322/P[6]__AFA51886.1__P2_VP8*(65-223)_Ferritin (opt4)
aggagaaagcuuaccaugcaguacaucaaggccaacagcaaguucaucggcaucaccgagcugggcagcggcagcggccuggacggccccuaccagcccaccaacuucaagccccccaacgacuacuggauccugcugaaccccaccaaccagcagguggugcuggagggcaccaacaagaccgacaucuggguggcccugcugcugguggagcccaacgugaccaaccagagcagacaguacacccuguucggcgagaccaagcagaucaccguggagaacaacaccaacaaguggaaguucuucgagauguucagaagcagcgugagcgccgaguuccagcacaagagaacccugaccagcgacaccaagcuggccggcuucaugaaguucuacaacagcguguggaccuuccacggcgagacccccaacgccaccaccgacuacagcagcaccagcaaccuguucgagguggagaccgugauccacguggaguucuacaucauccccagaagccaggagagcaagugcagcgaguacaucaacaccggccugagcggcggcgacaucaucaagcugcugaacgagcaggugaacaaggagaugcagagcagcaaccuguacaugagcaugagcagcuggugcuacacccacagccuggacggcgccggccuguuccuguucgaccacgccgccgaggaguacgagcacgccaagaagcugaucaucuuccugaacgagaacaacgugcccgugcagcugaccagcaucagcgcccccgagcacaaguucgagggccugacccagaucuuccagaaggccuacgagcacgagcagcacaucagcgagagcaucaacaacaucguggaccacgccaucaagagcaaggaccacgccaccuucaacuuccugcagugguacguggccgagcagcacgaggaggaggugcuguucaaggacauccuggacaagaucgagcugaucggcaacgagaaccacggccuguaccuggccgaccaguacgugaagggcaucgccaagagcagaaagagcugaggacuaguuauaagacugacuagcccgaugggccucccaacgggcccuccuccccuccuugcaccgagauuaauaaaaaaaaaaaaaaaaaaaaaaaaaaaaaaaaaaaaaaaaaaaaaaaaaaaaaaaaaaaaaaaaaaaaaaaaaaaaaaaaaaaaaaaaaaaaaaaaaaaa

SEQ ID NO: 1040 - RNA, 1230 nt, Artificial Sequence
  mRNA product Design i-3 (A100) comprising derived and/or modified sequence from RVA/1076/P[6]__AAA47337.1__P2_VP8*(65-223)_Ferritin (opt4)
aggagaaagcuuaccaugcaguacaucaaggccaacagcaaguucaucggcaucaccgagcugggcagcggcagcggccuggacggccccuaccagcccaccagcuucaagccccccagcgacuacuggauccugcugaaccccaccaaccagcagguggugcuggagggcaccaacaagaccgacaucuggguggcccugcugcugguggagcccaacgugaccaaccagagcagacaguacacccuguucggcgagaccaagcagaucaccguggagaacaacaccaacaaguggaaguucuucgagauguucagaagcagcgugagcgccgaguuccagcacaagagaacccugaccagcgacaccaagcuggccggcuuccugaaguucuacaacagcguguggaccuucuacggcgagaccccccacgccaccaccgacuacagcagcaccagcaaccugagcgagguggagaccgccauccacguggaguucuacaucauccccagaagccaggagagcaagugcaacgaguacaucaacaccggccugagcggcggcgacaucaucaagcugcugaacgagcaggugaacaaggagaugcagagcagcaaccuguacaugagcaugagcagcuggugcuacacccacagccuggacggcgccggccuguuccuguucgaccacgccgccgaggaguacgagcacgccaagaagcugaucaucuuccugaacgagaacaacgugcccgugcagcugaccagcaucagcgcccccgagcacaaguucgagggccugacccagaucuuccagaaggccuacgagcacgagcagcacaucagcgagagcaucaacaacaucguggaccacgccaucaagagcaaggaccacgccaccuucaacuuccugcagugguacguggccgagcagcacgaggaggaggugcuguucaaggacauccuggacaagaucgagcugaucggcaacgagaaccacggccuguaccuggccgaccaguacgugaagggcaucgccaagagcagaaagagcugaggacuaguuauaagacugacuagcccgaugggccucccaacgggcccuccuccccuccuugcaccgagauuaauaaaaaaaaaaaaaaaaaaaaaaaaaaaaaaaaaaaaaaaaaaaaaaaaaaaaaaaaaaaaaaaaaaaaaaaaaaaaaaaaaaaaaaaaaaaaaaaaaaaa

SEQ ID NO: 1041 - RNA, 1230 nt, Artificial Sequence
  mRNA product Design i-3 (A100) comprising derived and/or modified sequence from RVA/BE1128/P[8]__AEX30671.1__P2_VP8*(65-223)_Ferritin (opt4)
aggagaaagcuuaccaugcaguacaucaaggccaacagcaaguucaucggcaucaccgagcugggcagcggcagcggccuggacggccccuaccagcccaccaccuucaccccccccaccgacuacuggauccugaucaccagcaacaccaacggcgugguguacgagagcaccaacaacagcgacuucuggaccgccgugaucgccguggagccccacgugaaccccguggacagacaguacaacguguucggcgagaacaagcaguucaacgugagaaacgacagcgacaaguggaaguuccuggagauguucagaggcagcagccagaacgacuucuacaacagaagaacccugaccagcgacaccagacuggugggcauccugaaguacggcggcagaguguggaccuuccacggcgagacccccagagccaccaccgacagcagcaacaccgccaaccuggacggcaucagcaucaccauccacagcgaguucuacaucauccccagaagccaggagagcaagugcaacgaguacaucaacaacggccugagcggcggcgacaucaucaagcugcugaacgagcaggugaacaaggagaugcagagcagcaaccuguacaugagcaugagcagcuggugcuacacccacagccuggacggcgccggccuguuccuguucgaccacgccgccgaggaguacgagcacgccaagaagcugaucaucuuccugaacgagaacaacgugcccgugcagcugaccagcaucagcgcccccgagcacaaguucgagggccugacccagaucuuccagaaggccuacgagcacgagcagcacaucagcgagagcaucaacaacaucguggaccacgccaucaagagcaaggaccacgccaccuucaacuuccugcagugguacguggccgagcagcacgaggaggaggugcuguucaaggacauccuggacaagaucgagcugaucggcaacgagaaccacggccuguaccuggccgaccaguacgugaagggcaucgccaagagcagaaagagcugaggacuaguuauaagacugacuagcccgaugggccucccaacgggcccuccuccccuccuugcaccgagauuaauaaaaaaaaaaaaaaaaaaaaaaaaaaaaaaaaaaaaaaaaaaaaaaaaaaaaaaaaaaaaaaaaaaaaaaaaaaaaaaaaaaaaaaaaaaaaaaaaaaaa

SEQ ID NO: 1042 - RNA, 1230 nt, Artificial Sequence
  mRNA product Design i-3 (A100) comprising derived and/or modified sequence from RVA/Wa-VirWa/P[8]__ACR22783.1__P2_VP8*(65-223)_Ferritin (opt4)
aggagaaagcuuaccaugcaguacaucaaggccaacagcaaguucaucggcaucaccgagcugggcagcggcagcggccuggacggccccuaccagcccaccaccuucaccccccccaacgacuacuggauccugaucaacagcaacaccaacggcgugguguacgagagcaccaacaacagcgacuucuggaccgccgugguggccaucgagccccacgugaaccccguggacagacaguacaccaucuucggcgagagcaagcaguucaacgugagaaacgacagcaacaaguggaaguuccuggagauguucagaagcagcagccagaacgaguucuacaacagaagaacccugaccagcgacaccagacuggugggcauccugaaguacggcggcagaguguggaccuuccacggcgagacccccagagccaccaccgacagcagcagcaccgccaaccugaacaacaucagcaucaccauccacagcgaguucuacaucauccccagaagccaggagagcaagugcaacgaguacaucaacaacggccugagcggcggcgacaucaucaagcugcugaacgagcaggugaacaaggagaugcagagcagcaaccuguacaugagcaugagcagcuggugcuacacccacagccuggacggcgccggccuguuccuguucgaccacgccgccgaggaguacgagcacgccaagaagcugaucaucuuccugaacgagaacaacgugcccgugcagcugaccagcaucagcgcccccgagcacaaguucgagggccugacccagaucuuccagaaggccuacgagcacgagcagcacaucagcgagagcaucaacaacaucguggaccacgccaucaagagcaaggaccacgccaccuucaacuuccugcagugguacguggccgagcagcacgaggaggaggugcuguucaaggacauccuggacaagaucgagcugaucggcaacgagaaccacggccuguaccuggccgaccaguacgugaagggcaucgccaagagcagaaagagcugaggacuaguuauaagacugacuagcccgaugggccucccaacgggcccuccuccccuccuugcaccgagauuaauaaaaaaaaaaaaaaaaaaaaaaaaaaaaaaaaaaaaaaaaaaaaaaaaaaaaaaaaaaaaaaaaaaaaaaaaaaaaaaaaaaaaaaaaaaaaaaaaaaaa

SEQ ID NO: 1043 - RNA, 1230 nt, Artificial Sequence
  mRNA product Design i-3 (A100) comprising derived and/or modified sequence from RVA/Wa/P[8]__AAA47290.1__P2_VP8*(65-223)_Ferritin (opt4)
aggagaaagcuuaccaugcaguacaucaaggccaacagcaaguucaucggcaucaccgagcugggcagcggcagcggccuggacggccccuaccagcccaccaccuucaccccccccaacgacuacuggauccugaucaacagcaacaccaacggcgugguguacgagagcaccaacaacagcgacuucuggaccgccgugguggccaucgagccccacgugaaccccguggacagacaguacaccaucuucggcgagagcaagcaguucaacgugagcaacgacagcaacaaguggaaguuccuggagauguucagaagcagcagccagaacgaguucuacaacagaagaacccugaccagcgacaccagauucgugggcauccugaaguacggcggcagaguguggaccuuccacggcgagacccccagagccaccaccgacagcagcagcaccgccaaccugaacaacaucagcaucaccauccacagcgaguucuacaucauccccagaagccaggagagcaagugcaacgaguacaucaacaacggccugagcggcggcgacaucaucaagcugcugaacgagcaggugaacaaggagaugcagagcagcaaccuguacaugagcaugagcagcuggugcuacacccacagccuggacggcgccggccuguuccuguucgaccacgccgccgaggaguacgagcacgccaagaagcugaucaucuuccugaacgagaacaacgugcccgugcagcugaccagcaucagcgcccccgagcacaaguucgagggccugacccagaucuuccagaaggccuacgagcacgagcagcacaucagcgagagcaucaacaacaucguggaccacgccaucaagagcaaggaccacgccaccuucaacuuccugcagugguacguggccgagcagcacgaggaggaggugcuguucaaggacauccuggacaagaucgagcugaucggcaacgagaaccacggccuguaccuggccgaccaguacgugaagggcaucgccaagagcagaaagagcugaggacuaguuauaagacugacuagcccgaugggccucccaacgggcccuccuccccuccuugcaccgagauuaauaaaaaaaaaaaaaaaaaaaaaaaaaaaaaaaaaaaaaaaaaaaaaaaaaaaaaaaaaaaaaaaaaaaaaaaaaaaaaaaaaaaaaaaaaaaaaaaaaaaa

SEQ ID NO: 1044 - RNA, 1230 nt, Artificial Sequence; identical to SEQ ID NO: 1043
  mRNA product Design i-3 (A100) comprising derived and/or modified sequence from RVA/Wa/P[8]__AAA66953.1__P2_VP8*(65-223)_Ferritin (opt4)

SEQ ID NO: 1045 - RNA, 1302 nt, Artificial Sequence
  mRNA product Design i-3 (A100) comprising derived and/or modified sequence from RVA/BE1058/P[4]__AEX30665.1__P2_VP8*(41-223)_Ferritin (opt4)
aggagaaagcuuaccaugcaguacaucaaggccaacagcaaguucaucggcaucaccgagcugggcagcggcagcggcgcccagaccagauacgcccccgugaacuggggccacggcgagaucaacgacagcaccaccguggagcccgugcuggacggccccuaccagcccaccaccuucaagccccccaacgacuacuggcugcugaucagcagcaacaccgacggcgugguguacgagagcaccaacaacagcgacuucuggaccgccgugaucgccguggagccccacgugaaccagaccaacagacaguacgugcuguucggcgagaacaagcaguucaacaucgagaacagcagcgacaaguggaaguucuucgagauguucaagggcaacagccagagcgacuucagcaacagaagaacccugaccagcagcaacagacuggugggcaugcugaaguacggcggcagaguguggaccuuccacggcgagacccccagagccaccaccgacagcagcagcaccgccgaccugaacaacaucagcaucaucauccacagcgaguucuacaucauccccagaagccaggagagcaagugcaacgaguacaucaacaacggccugagcggcggcgacaucaucaagcugcugaacgagcaggugaacaaggagaugcagagcagcaaccuguacaugagcaugagcagcuggugcuacacccacagccuggacggcgccggccuguuccuguucgaccacgccgccgaggaguacgagcacgccaagaagcugaucaucuuccugaacgagaacaacgugcccgugcagcugaccagcaucagcgcccccgagcacaaguucgagggccugacccagaucuuccagaaggccuacgagcacgagcagcacaucagcgagagcaucaacaacaucguggaccacgccaucaagagcaaggaccacgccaccuucaacuuccugcagugguacguggccgagcagcacgaggaggaggugcuguucaaggacauccuggacaagaucgagcugaucggcaacgagaaccacggccuguaccuggccgaccaguacgugaagggcaucgccaagagcagaaagagcugaggacuaguuauaagacugacuagcccgaugggccucccaacgggcccuccuccccuccuugcaccgagauuaauaaaaaaaaaaaaaaaaaaaaaaaaaaaaaaaaaaaaaaaaaaaaaaaaaaaaaaaaaaaaaaaaaaaaaaaaaaaaaaaaaaaaaaaaaaaaaaaaaaaa

SEQ ID NO: 1046 - RNA, 1302 nt, Artificial Sequence
  mRNA product Design i-3 (A100) comprising derived and/or modified sequence from RVA/DS-1/P[4]__CAD62680.1__P2_VP8*(41-223)_Ferritin (opt4)
aggagaaagcuuaccaugcaguacaucaaggccaacagcaaguucaucggcaucaccgagcugggcagcggcagcggcgcccagaccagauacgcccccgugaacuggggcagcugggagaucaacgacagcaccaccguggagcccgugcuggacggccccuaccagcccaccaccuucaagccccccaacgacuacuggcugcugaucagcagcaacaccaacggcgugguguacgagagcaccaacaacaacgacuucuggaccgccgugagcagcguggagccccacgugagccagaccaacagacaguacauccuguucggcgagaacaagcaguucaacguggagaacaacagcgacaaguggaaguucuucgagaccuucaccggcagcagccagggcaacuucagcaacagaagaacccugaccagcagcaacagacuggugggcaugcugaaguacggcggcagaguguggaccuuccacggcgagacccccagagccaccaccgacagcagcaacaccgccgaccugaacaacaucagcaucaucauccacagcgaguucuacaucauccccagaagccaggagagcaagugcaacgaguacaucaacaacggccugagcggcggcgacaucaucaagcugcugaacgagcaggugaacaaggagaugcagagcagcaaccuguacaugagcaugagcagcuggugcuacacccacagccuggacggcgccggccuguuccuguucgaccacgccgccgaggaguacgagcacgccaagaagcugaucaucuuccugaacgagaacaacgugcccgugcagcugaccagcaucagcgcccccgagcacaaguucgagggccugacccagaucuuccagaaggccuacgagcacgagcagcacaucagcgagagcaucaacaacaucguggaccacgccaucaagagcaaggaccacgccaccuucaacuuccugcagugguacguggccgagcagcacgaggaggaggugcuguucaaggacauccuggacaagaucgagcugaucggcaacgagaaccacggccuguaccuggccgaccaguacgugaagggcaucgccaagagcagaaagagcugaggacuaguuauaagacugacuagcccgaugggccucccaacgggcccuccuccccuccuugcaccgagauuaauaaaaaaaaaaaaaaaaaaaaaaaaaaaaaaaaaaaaaaaaaaaaaaaaaaaaaaaaaaaaaaaaaaaaaaaaaaaaaaaaaaaaaaaaaaaaaaaaaaaa

SEQ ID NO: 1047 - RNA, 1302 nt, Artificial Sequence; identical to SEQ ID NO: 1046
  mRNA product Design i-3 (A100) comprising derived and/or modified sequence from RVA/DS-1/P[4]__ABV53252.1__P2_VP8*(41-223)_Ferritin (opt4)

SEQ ID NO: 1048 - RNA, 1302 nt, Artificial Sequence
  mRNA product Design i-3 (A100) comprising derived and/or modified sequence from RVA/F01322/P[6]__AFA51886.1__P2_VP8*(41-223)_Ferritin (opt4)
aggagaaagcuuaccaugcaguacaucaaggccaacagcaaguucaucggcaucaccgagcugggcagcggcagcggcgcccagaccaacuacgcccccgugaccuggagccacggcgaggugaacgacagcaccaccaucgagcccgugcuggacggccccuaccagcccaccaacuucaagccccccaacgacuacuggauccugcugaaccccaccaaccagcagguggugcuggagggcaccaacaagaccgacaucuggguggcccugcugcugguggagcccaacgugaccaaccagagcagacaguacacccuguucggcgagaccaagcagaucaccguggagaacaacaccaacaaguggaaguucuucgagauguucagaagcagcgugagcgccgaguuccagcacaagagaacccugaccagcgacaccaagcuggccggcuucaugaaguucuacaacagcguguggaccuuccacggcgagacccccaacgccaccaccgacuacagcagcaccagcaaccuguucgagguggagaccgugauccacguggaguucuacaucauccccagaagccaggagagcaagugcagcgaguacaucaacaccggccugagcggcggcgacaucaucaagcugcugaacgagcaggugaacaaggagaugcagagcagcaaccuguacaugagcaugagcagcuggugcuacacccacagccuggacggcgccggccuguuccuguucgaccacgccgccgaggaguacgagcacgccaagaagcugaucaucuuccugaacgagaacaacgugcccgugcagcugaccagcaucagcgcccccgagcacaaguucgagggccugacccagaucuuccagaaggccuacgagcacgagcagcacaucagcgagagcaucaacaacaucguggaccacgccaucaagagcaaggaccacgccaccuucaacuuccugcagugguacguggccgagcagcacgaggaggaggugcuguucaaggacauccuggacaagaucgagcugaucggcaacgagaaccacggccuguaccuggccgaccaguacgugaagggcaucgccaagagcagaaagagcugaggacuaguuauaagacugacuagcccgaugggccucccaacgggcccuccuccccuccuugcaccgagauuaauaaaaaaaaaaaaaaaaaaaaaaaaaaaaaaaaaaaaaaaaaaaaaaaaaaaaaaaaaaaaaaaaaaaaaaaaaaaaaaaaaaaaaaaaaaaaaaaaaaaa

SEQ ID NO: 1049 - RNA, 1302 nt, Artificial Sequence
  mRNA product Design i-3 (A100) comprising derived and/or modified sequence from RVA/1076/P[6]__AAA47337.1__P2_VP8*(41-223)_Ferritin (opt4)
aggagaaagcuuaccaugcaguacaucaaggccaacagcaaguucaucggcaucaccgagcugggcagcggcagcggcgcccagaccaacuacgcccccgugaccuggagccacggcgaggugaacgacagcaccaccaucgagcccgugcuggacggccccuaccagcccaccagcuucaagccccccagcgacuacuggauccugcugaaccccaccaaccagcagguggugcuggagggcaccaacaagaccgacaucuggguggcccugcugcugguggagcccaacgugaccaaccagagcagacaguacacccuguucggcgagaccaagcagaucaccguggagaacaacaccaacaaguggaaguucuucgagauguucagaagcagcgugagcgccgaguuccagcacaagagaacccugaccagcgacaccaagcuggccggcuuccugaaguucuacaacagcguguggaccuucuacggcgagaccccccacgccaccaccgacuacagcagcaccagcaaccugagcgagguggagaccgccauccacguggaguucuacaucauccccagaagccaggagagcaagugcaacgaguacaucaacaccggccugagcggcggcgacaucaucaagcugcugaacgagcaggugaacaaggagaugcagagcagcaaccuguacaugagcaugagcagcuggugcuacacccacagccuggacggcgccggccuguuccuguucgaccacgccgccgaggaguacgagcacgccaagaagcugaucaucuuccugaacgagaacaacgugcccgugcagcugaccagcaucagcgcccccgagcacaaguucgagggccugacccagaucuuccagaaggccuacgagcacgagcagcacaucagcgagagcaucaacaacaucguggaccacgccaucaagagcaaggaccacgccaccuucaacuuccugcagugguacguggccgagcagcacgaggaggaggugcuguucaaggacauccuggacaagaucgagcugaucggcaacgagaaccacggccuguaccuggccgaccaguacgugaagggcaucgccaagagcagaaagagcugaggacuaguuauaagacugacuagcccgaugggccucccaacgggcccuccuccccuccuugcaccgagauuaauaaaaaaaaaaaaaaaaaaaaaaaaaaaaaaaaaaaaaaaaaaaaaaaaaaaaaaaaaaaaaaaaaaaaaaaaaaaaaaaaaaaaaaaaaaaaaaaaaaaa

SEQ ID NO: 1050 - RNA, 1302 nt, Artificial Sequence
  mRNA product Design i-3 (A100) comprising derived and/or modified sequence from RVA/BE1128/P[8]__AEX30671.1__P2_VP8*(41-223)_Ferritin (opt4)
aggagaaagcuuaccaugcaguacaucaaggccaacagcaaguucaucggcaucaccgagcugggcagcggcagcggcgcccagaccagauacgcccccgugaacuggggccacggcgagaucaacgacagcaccaccguggagcccauccuggacggccccuaccagcccaccaccuucaccccccccaccgacuacuggauccugaucaccagcaacaccaacggcgugguguacgagagcaccaacaacagcgacuucuggaccgccgugaucgccguggagccccacgugaaccccguggacagacaguacaacguguucggcgagaacaagcaguucaacgugagaaacgacagcgacaaguggaaguuccuggagauguucagaggcagcagccagaacgacuucuacaacagaagaacccugaccagcgacaccagacuggugggcauccugaaguacggcggcagaguguggaccuuccacggcgagacccccagagccaccaccgacagcagcaacaccgccaaccuggacggcaucagcaucaccauccacagcgaguucuacaucauccccagaagccaggagagcaagugcaacgaguacaucaacaacggccugagcggcggcgacaucaucaagcugcugaacgagcaggugaacaaggagaugcagagcagcaaccuguacaugagcaugagcagcuggugcuacacccacagccuggacggcgccggccuguuccuguucgaccacgccgccgaggaguacgagcacgccaagaagcugaucaucuuccugaacgagaacaacgugcccgugcagcugaccagcaucagcgcccccgagcacaaguucgagggccugacccagaucuuccagaaggccuacgagcacgagcagcacaucagcgagagcaucaacaacaucguggaccacgccaucaagagcaaggaccacgccaccuucaacuuccugcagugguacguggccgagcagcacgaggaggaggugcuguucaaggacauccuggacaagaucgagcugaucggcaacgagaaccacggccuguaccuggccgaccaguacgugaagggcaucgccaagagcagaaagagcugaggacuaguuauaagacugacuagcccgaugggccucccaacgggcccuccuccccuccuugcaccgagauuaauaaaaaaaaaaaaaaaaaaaaaaaaaaaaaaaaaaaaaaaaaaaaaaaaaaaaaaaaaaaaaaaaaaaaaaaaaaaaaaaaaaaaaaaaaaaaaaaaaaaa

SEQ ID NO: 1051 - RNA, 1302 nt, Artificial Sequence
  mRNA product Design i-3 (A100) comprising derived and/or modified sequence from RVA/Wa-VirWa/P[8]__ACR22783.1__P2_VP8*(41-223)_Ferritin (opt4)
aggagaaagcuuaccaugcaguacaucaaggccaacagcaaguucaucggcaucaccgagcugggcagcggcagcggcgcccagaccagauacgcccccgugaacuggggccacggcgagaucaacgacagcaccaccguggagcccauccuggacggccccuaccagcccaccaccuucaccccccccaacgacuacuggauccugaucaacagcaacaccaacggcgugguguacgagagcaccaacaacagcgacuucuggaccgccgugguggccaucgagccccacgugaaccccguggacagacaguacaccaucuucggcgagagcaagcaguucaacgugagaaacgacagcaacaaguggaaguuccuggagauguucagaagcagcagccagaacgaguucuacaacagaagaacccugaccagcgacaccagacuggugggcauccugaaguacggcggcagaguguggaccuuccacggcgagacccccagagccaccaccgacagcagcagcaccgccaaccugaacaacaucagcaucaccauccacagcgaguucuacaucauccccagaagccaggagagcaagugcaacgaguacaucaacaacggccugagcggcggcgacaucaucaagcugcugaacgagcaggugaacaaggagaugcagagcagcaaccuguacaugagcaugagcagcuggugcuacacccacagccuggacggcgccggccuguuccuguucgaccacgccgccgaggaguacgagcacgccaagaagcugaucaucuuccugaacgagaacaacgugcccgugcagcugaccagcaucagcgcccccgagcacaaguucgagggccugacccagaucuuccagaaggccuacgagcacgagcagcacaucagcgagagcaucaacaacaucguggaccacgccaucaagagcaaggaccacgccaccuucaacuuccugcagugguacguggccgagcagcacgaggaggaggugcuguucaaggacauccuggacaagaucgagcugaucggcaacgagaaccacggccuguaccuggccgaccaguacgugaagggcaucgccaagagcagaaagagcugaggacuaguuauaagacugacuagcccgaugggccucccaacgggcccuccuccccuccuugcaccgagauuaauaaaaaaaaaaaaaaaaaaaaaaaaaaaaaaaaaaaaaaaaaaaaaaaaaaaaaaaaaaaaaaaaaaaaaaaaaaaaaaaaaaaaaaaaaaaaaaaaaaaa

SEQ ID NO: 1052 - RNA, 1302 nt, Artificial Sequence
  mRNA product Design i-3 (A100) comprising derived and/or modified sequence from RVA/Wa/P[8]__AAA47290.1__P2_VP8*(41-223)_Ferritin (opt4)
aggagaaagcuuaccaugcaguacaucaaggccaacagcaaguucaucggcaucaccgagcugggcagcggcagcggcgcccagaccagauacgcccccgugaacuggggccacggcgagaucaacgacagcaccaccguggagcccauccuggacggccccuaccagcccaccaccuucaccccccccaacgacuacuggauccugaucaacagcaacaccaacggcgugguguacgagagcaccaacaacagcgacuucuggaccgccgugguggccaucgagccccacgugaaccccguggacagacaguacaccaucuucggcgagagcaagcaguucaacgugagcaacgacagcaacaaguggaaguuccuggagauguucagaagcagcagccagaacgaguucuacaacagaagaacccugaccagcgacaccagauucgugggcauccugaaguacggcggcagaguguggaccuuccacggcgagacccccagagccaccaccgacagcagcagcaccgccaaccugaacaacaucagcaucaccauccacagcgaguucuacaucauccccagaagccaggagagcaagugcaacgaguacaucaacaacggccugagcggcggcgacaucaucaagcugcugaacgagcaggugaacaaggagaugcagagcagcaaccuguacaugagcaugagcagcuggugcuacacccacagccuggacggcgccggccuguuccuguucgaccacgccgccgaggaguacgagcacgccaagaagcugaucaucuuccugaacgagaacaacgugcccgugcagcugaccagcaucagcgcccccgagcacaaguucgagggccugacccagaucuuccagaaggccuacgagcacgagcagcacaucagcgagagcaucaacaacaucguggaccacgccaucaagagcaaggaccacgccaccuucaacuuccugcagugguacguggccgagcagcacgaggaggaggugcuguucaaggacauccuggacaagaucgagcugaucggcaacgagaaccacggccuguaccuggccgaccaguacgugaagggcaucgccaagagcagaaagagcugaggacuaguuauaagacugacuagcccgaugggccucccaacgggcccuccuccccuccuugcaccgagauuaauaaaaaaaaaaaaaaaaaaaaaaaaaaaaaaaaaaaaaaaaaaaaaaaaaaaaaaaaaaaaaaaaaaaaaaaaaaaaaaaaaaaaaaaaaaaaaaaaaaaa

SEQ ID NO: 1053 - RNA, 1302 nt, Artificial Sequence
  mRNA product Design i-3 (A100) comprising derived and/or modified sequence from RVA/Wa/P[8]__AAA66953.1__P2_VP8*(41-223)_Ferritin (opt4)
aggagaaagcuuaccaugcaguacaucaaggccaacagcaaguucaucggcaucaccgagcugggcagcggcagcggcgcccagaccagauacgcccccgugaacuggggccacggcgagaucaacgacagcaccaccguggagcccaugcuggacggccccuaccagcccaccaccuucaccccccccaacgacuacuggauccugaucaacagcaacaccaacggcgugguguacgagagcaccaacaacagcgacuucuggaccgccgugguggccaucgagccccacgugaaccccguggacagacaguacaccaucuucggcgagagcaagcaguucaacgugagcaacgacagcaacaaguggaaguuccuggagauguucagaagcagcagccagaacgaguucuacaacagaagaacccugaccagcgacaccagauucgugggcauccugaaguacggcggcagaguguggaccuuccacggcgagacccccagagccaccaccgacagcagcagcaccgccaaccugaacaacaucagcaucaccauccacagcgaguucuacaucauccccagaagccaggagagcaagugcaacgaguacaucaacaacggccugagcggcggcgacaucaucaagcugcugaacgagcaggugaacaaggagaugcagagcagcaaccuguacaugagcaugagcagcuggugcuacacccacagccuggacggcgccggccuguuccuguucgaccacgccgccgaggaguacgagcacgccaagaagcugaucaucuuccugaacgagaacaacgugcccgugcagcugaccagcaucagcgcccccgagcacaaguucgagggccugacccagaucuuccagaaggccuacgagcacgagcagcacaucagcgagagcaucaacaacaucguggaccacgccaucaagagcaaggaccacgccaccuucaacuuccugcagugguacguggccgagcagcacgaggaggaggugcuguucaaggacauccuggacaagaucgagcugaucggcaacgagaaccacggccuguaccuggccgaccaguacgugaagggcaucgccaagagcagaaagagcugaggacuaguuauaagacugacuagcccgaugggccucccaacgggcccuccuccccuccuugcaccgagauuaauaaaaaaaaaaaaaaaaaaaaaaaaaaaaaaaaaaaaaaaaaaaaaaaaaaaaaaaaaaaaaaaaaaaaaaaaaaaaaaaaaaaaaaaaaaaaaaaaaaaa

SEQ ID NO: 1054 - RNA, 1236 nt, Artificial Sequence
  mRNA product Design i-3 (A100) comprising derived and/or modified sequence from RVA/BE1058/P[4]__AEX30665.1__LumSynt_P2_VP8*(65-223) (opt4)
aggagaaagcuuaccaugcagaucuacgagggcaagcugaccgccgagggccugagauucggcaucguggccagcagauucaaccacgcccugguggacagacugguggagggcgccaucgacgccaucgugagacacggcggcagagaggaggacaucacccuggugagagugcccggcagcugggagauccccguggccgccggcgagcuggccagaaaggaggacaucgacgccgugaucgccaucggcgugcugaucagaggcgccaccccccacuucgacuacaucgccagcgaggugagcaagggccuggccgaccugagccuggagcugagaaagcccaucaccuucggcgugaucaccgccgacacccuggagcaggccaucgagagagccggcaccaagcacggcaacaagggcugggaggccgcccugagcgccaucgagauggccaaccuguucaagagccugagaggcggcagcggcggcagcggcggcagcggcggcagcggcggcggccaguacaucaaggccaacagcaaguucaucggcaucaccgagcugggcagcggcagcggccuggacggccccuaccagcccaccaccuucaagccccccaacgacuacuggcugcugaucagcagcaacaccgacggcgugguguacgagagcaccaacaacagcgacuucuggaccgccgugaucgccguggagccccacgugaaccagaccaacagacaguacgugcuguucggcgagaacaagcaguucaacaucgagaacagcagcgacaaguggaaguucuucgagauguucaagggcaacagccagagcgacuucagcaacagaagaacccugaccagcagcaacagacuggugggcaugcugaaguacggcggcagaguguggaccuuccacggcgagacccccagagccaccaccgacagcagcagcaccgccgaccugaacaacaucagcaucaucauccacagcgaguucuacaucauccccagaagccaggagagcaagugcaacgaguacaucaacaacggccugugaggacuaguuauaagacugacuagcccgaugggccucccaacgggcccuccuccccuccuugcaccgagauuaauaaaaaaaaaaaaaaaaaaaaaaaaaaaaaaaaaaaaaaaaaaaaaaaaaaaaaaaaaaaaaaaaaaaaaaaaaaaaaaaaaaaaaaaaaaaaaaaaaaaa

SEQ ID NO: 1055 - RNA, 1236 nt, Artificial Sequence
  mRNA product Design i-3 (A100) comprising derived and/or modified sequence from RVA/DS-1/P[4]__CAD62680.1__LumSynt_P2_VP8*(65-223) (opt4)
aggagaaagcuuaccaugcagaucuacgagggcaagcugaccgccgagggccugagauucggcaucguggccagcagauucaaccacgcccugguggacagacugguggagggcgccaucgacgccaucgugagacacggcggcagagaggaggacaucacccuggugagagugcccggcagcugggagauccccguggccgccggcgagcuggccagaaaggaggacaucgacgccgugaucgccaucggcgugcugaucagaggcgccaccccccacuucgacuacaucgccagcgaggugagcaagggccuggccgaccugagccuggagcugagaaagcccaucaccuucggcgugaucaccgccgacacccuggagcaggccaucgagagagccggcaccaagcacggcaacaagggcugggaggccgcccugagcgccaucgagauggccaaccuguucaagagccugagaggcggcagcggcggcagcggcggcagcggcggcagcggcggcggccaguacaucaaggccaacagcaaguucaucggcaucaccgagcugggcagcggcagcggccuggacggccccuaccagcccaccaccuucaagccccccaacgacuacuggcugcugaucagcagcaacaccaacggcgugguguacgagagcaccaacaacaacgacuucuggaccgccgugagcagcguggagccccacgugagccagaccaacagacaguacauccuguucggcgagaacaagcaguucaacguggagaacaacagcgacaaguggaaguucuucgagaccuucaccggcagcagccagggcaacuucagcaacagaagaacccugaccagcagcaacagacuggugggcaugcugaaguacggcggcagaguguggaccuuccacggcgagacccccagagccaccaccgacagcagcaacaccgccgaccugaacaacaucagcaucaucauccacagcgaguucuacaucauccccagaagccaggagagcaagugcaacgaguacaucaacaacggccugugaggacuaguuauaagacugacuagcccgaugggccucccaacgggcccuccuccccuccuugcaccgagauuaauaaaaaaaaaaaaaaaaaaaaaaaaaaaaaaaaaaaaaaaaaaaaaaaaaaaaaaaaaaaaaaaaaaaaaaaaaaaaaaaaaaaaaaaaaaaaaaaaaaaa

SEQ ID NO: 1056 - RNA, 1236 nt, Artificial Sequence; identical to SEQ ID NO: 1055
  mRNA product Design i-3 (A100) comprising derived and/or modified sequence from RVA/DS-1/P[4]__ABV53252.1__LumSynt_P2_VP8*(65-223) (opt4)

SEQ ID NO: 1057 - RNA, 1236 nt, Artificial Sequence
  mRNA product Design i-3 (A100) comprising derived and/or modified sequence from RVA/F01322/P[6]__AFA51886.1__LumSynt_P2_VP8*(65-223) (opt4)
aggagaaagcuuaccaugcagaucuacgagggcaagcugaccgccgagggccugagauucggcaucguggccagcagauucaaccacgcccugguggacagacugguggagggcgccaucgacgccaucgugagacacggcggcagagaggaggacaucacccuggugagagugcccggcagcugggagauccccguggccgccggcgagcuggccagaaaggaggacaucgacgccgugaucgccaucggcgugcugaucagaggcgccaccccccacuucgacuacaucgccagcgaggugagcaagggccuggccgaccugagccuggagcugagaaagcccaucaccuucggcgugaucaccgccgacacccuggagcaggccaucgagagagccggcaccaagcacggcaacaagggcugggaggccgcccugagcgccaucgagauggccaaccuguucaagagccugagaggcggcagcggcggcagcggcggcagcggcggcagcggcggcggccaguacaucaaggccaacagcaaguucaucggcaucaccgagcugggcagcggcagcggccuggacggccccuaccagcccaccaacuucaagccccccaacgacuacuggauccugcugaaccccaccaaccagcagguggugcuggagggcaccaacaagaccgacaucuggguggcccugcugcugguggagcccaacgugaccaaccagagcagacaguacacccuguucggcgagaccaagcagaucaccguggagaacaacaccaacaaguggaaguucuucgagauguucagaagcagcgugagcgccgaguuccagcacaagagaacccugaccagcgacaccaagcuggccggcuucaugaaguucuacaacagcguguggaccuuccacggcgagacccccaacgccaccaccgacuacagcagcaccagcaaccuguucgagguggagaccgugauccacguggaguucuacaucauccccagaagccaggagagcaagugcagcgaguacaucaacaccggccugugaggacuaguuauaagacugacuagcccgaugggccucccaacgggcccuccuccccuccuugcaccgagauuaauaaaaaaaaaaaaaaaaaaaaaaaaaaaaaaaaaaaaaaaaaaaaaaaaaaaaaaaaaaaaaaaaaaaaaaaaaaaaaaaaaaaaaaaaaaaaaaaaaaaa

SEQ ID NO: 1058 - RNA, 1236 nt, Artificial Sequence
  mRNA product Design i-3 (A100) comprising derived and/or modified sequence from RVA/1076/P[6]__AAA47337.1__LumSynt_P2_VP8*(65-223) (opt4)
aggagaaagcuuaccaugcagaucuacgagggcaagcugaccgccgagggccugagauucggcaucguggccagcagauucaaccacgcccugguggacagacugguggagggcgccaucgacgccaucgugagacacggcggcagagaggaggacaucacccuggugagagugcccggcagcugggagauccccguggccgccggcgagcuggccagaaaggaggacaucgacgccgugaucgccaucggcgugcugaucagaggcgccaccccccacuucgacuacaucgccagcgaggugagcaagggccuggccgaccugagccuggagcugagaaagcccaucaccuucggcgugaucaccgccgacacccuggagcaggccaucgagagagccggcaccaagcacggcaacaagggcugggaggccgcccugagcgccaucgagauggccaaccuguucaagagccugagaggcggcagcggcggcagcggcggcagcggcggcagcggcggcggccaguacaucaaggccaacagcaaguucaucggcaucaccgagcugggcagcggcagcggccuggacggccccuaccagcccaccagcuucaagccccccagcgacuacuggauccugcugaaccccaccaaccagcagguggugcuggagggcaccaacaagaccgacaucuggguggcccugcugcugguggagcccaacgugaccaaccagagcagacaguacacccuguucggcgagaccaagcagaucaccguggagaacaacaccaacaaguggaaguucuucgagauguucagaagcagcgugagcgccgaguuccagcacaagagaacccugaccagcgacaccaagcuggccggcuuccugaaguucuacaacagcguguggaccuucuacggcgagaccccccacgccaccaccgacuacagcagcaccagcaaccugagcgagguggagaccgccauccacguggaguucuacaucauccccagaagccaggagagcaagugcaacgaguacaucaacaccggccugugaggacuaguuauaagacugacuagcccgaugggccucccaacgggcccuccuccccuccuugcaccgagauuaauaaaaaaaaaaaaaaaaaaaaaaaaaaaaaaaaaaaaaaaaaaaaaaaaaaaaaaaaaaaaaaaaaaaaaaaaaaaaaaaaaaaaaaaaaaaaaaaaaaaa

SEQ ID NO: 1059 - RNA, 1236 nt, Artificial Sequence
  mRNA product Design i-3 (A100) comprising derived and/or modified sequence from RVA/BE1128/P[8]__AEX30671.1__LumSynt_P2_VP8*(65-223) (opt4)
aggagaaagcuuaccaugcagaucuacgagggcaagcugaccgccgagggccugagauucggcaucguggccagcagauucaaccacgcccugguggacagacugguggagggcgccaucgacgccaucgugagacacggcggcagagaggaggacaucacccuggugagagugcccggcagcugggagauccccguggccgccggcgagcuggccagaaaggaggacaucgacgccgugaucgccaucggcgugcugaucagaggcgccaccccccacuucgacuacaucgccagcgaggugagcaagggccuggccgaccugagccuggagcugagaaagcccaucaccuucggcgugaucaccgccgacacccuggagcaggccaucgagagagccggcaccaagcacggcaacaagggcugggaggccgcccugagcgccaucgagauggccaaccuguucaagagccugagaggcggcagcggcggcagcggcggcagcggcggcagcggcggcggccaguacaucaaggccaacagcaaguucaucggcaucaccgagcugggcagcggcagcggccuggacggccccuaccagcccaccaccuucaccccccccaccgacuacuggauccugaucaccagcaacaccaacggcgugguguacgagagcaccaacaacagcgacuucuggaccgccgugaucgccguggagccccacgugaaccccguggacagacaguacaacguguucggcgagaacaagcaguucaacgugagaaacgacagcgacaaguggaaguuccuggagauguucagaggcagcagccagaacgacuucuacaacagaagaacccugaccagcgacaccagacuggugggcauccugaaguacggcggcagaguguggaccuuccacggcgagacccccagagccaccaccgacagcagcaacaccgccaaccuggacggcaucagcaucaccauccacagcgaguucuacaucauccccagaagccaggagagcaagugcaacgaguacaucaacaacggccugugaggacuaguuauaagacugacuagcccgaugggccucccaacgggcccuccuccccuccuugcaccgagauuaauaaaaaaaaaaaaaaaaaaaaaaaaaaaaaaaaaaaaaaaaaaaaaaaaaaaaaaaaaaaaaaaaaaaaaaaaaaaaaaaaaaaaaaaaaaaaaaaaaaaa

SEQ ID NO: 1060 - RNA, 1236 nt, Artificial Sequence
  mRNA product Design i-3 (A100) comprising derived and/or modified sequence from RVA/Wa-VirWa/P[8]__ACR22783.1__LumSynt_P2_VP8*(65-223) (opt4)
aggagaaagcuuaccaugcagaucuacgagggcaagcugaccgccgagggccugagauucggcaucguggccagcagauucaaccacgcccugguggacagacugguggagggcgccaucgacgccaucgugagacacggcggcagagaggaggacaucacccuggugagagugcccggcagcugggagauccccguggccgccggcgagcuggccagaaaggaggacaucgacgccgugaucgccaucggcgugcugaucagaggcgccaccccccacuucgacuacaucgccagcgaggugagcaagggccuggccgaccugagccuggagcugagaaagcccaucaccuucggcgugaucaccgccgacacccuggagcaggccaucgagagagccggcaccaagcacggcaacaagggcugggaggccgcccugagcgccaucgagauggccaaccuguucaagagccugagaggcggcagcggcggcagcggcggcagcggcggcagcggcggcggccaguacaucaaggccaacagcaaguucaucggcaucaccgagcugggcagcggcagcggccuggacggccccuaccagcccaccaccuucaccccccccaacgacuacuggauccugaucaacagcaacaccaacggcgugguguacgagagcaccaacaacagcgacuucuggaccgccgugguggccaucgagccccacgugaaccccguggacagacaguacaccaucuucggcgagagcaagcaguucaacgugagaaacgacagcaacaaguggaaguuccuggagauguucagaagcagcagccagaacgaguucuacaacagaagaacccugaccagcgacaccagacuggugggcauccugaaguacggcggcagaguguggaccuuccacggcgagacccccagagccaccaccgacagcagcagcaccgccaaccugaacaacaucagcaucaccauccacagcgaguucuacaucauccccagaagccaggagagcaagugcaacgaguacaucaacaacggccugugaggacuaguuauaagacugacuagcccgaugggccucccaacgggcccuccuccccuccuugcaccgagauuaauaaaaaaaaaaaaaaaaaaaaaaaaaaaaaaaaaaaaaaaaaaaaaaaaaaaaaaaaaaaaaaaaaaaaaaaaaaaaaaaaaaaaaaaaaaaaaaaaaaaa

SEQ ID NO: 1061 - RNA, 1236 nt, Artificial Sequence
  mRNA product Design i-3 (A100) comprising derived and/or modified sequence from RVA/Wa/P[8]__AAA47290.1__LumSynt_P2_VP8*(65-223) (opt4)
aggagaaagcuuaccaugcagaucuacgagggcaagcugaccgccgagggccugagauucggcaucguggccagcagauucaaccacgcccugguggacagacugguggagggcgccaucgacgccaucgugagacacggcggcagagaggaggacaucacccuggugagagugcccggcagcugggagauccccguggccgccggcgagcuggccagaaaggaggacaucgacgccgugaucgccaucggcgugcugaucagaggcgccaccccccacuucgacuacaucgccagcgaggugagcaagggccuggccgaccugagccuggagcugagaaagcccaucaccuucggcgugaucaccgccgacacccuggagcaggccaucgagagagccggcaccaagcacggcaacaagggcugggaggccgcccugagcgccaucgagauggccaaccuguucaagagccugagaggcggcagcggcggcagcggcggcagcggcggcagcggcggcggccaguacaucaaggccaacagcaaguucaucggcaucaccgagcugggcagcggcagcggccuggacggccccuaccagcccaccaccuucaccccccccaacgacuacuggauccugaucaacagcaacaccaacggcgugguguacgagagcaccaacaacagcgacuucuggaccgccgugguggccaucgagccccacgugaaccccguggacagacaguacaccaucuucggcgagagcaagcaguucaacgugagcaacgacagcaacaaguggaaguuccuggagauguucagaagcagcagccagaacgaguucuacaacagaagaacccugaccagcgacaccagauucgugggcauccugaaguacggcggcagaguguggaccuuccacggcgagacccccagagccaccaccgacagcagcagcaccgccaaccugaacaacaucagcaucaccauccacagcgaguucuacaucauccccagaagccaggagagcaagugcaacgaguacaucaacaacggccugugaggacuaguuauaagacugacuagcccgaugggccucccaacgggcccuccuccccuccuugcaccgagauuaauaaaaaaaaaaaaaaaaaaaaaaaaaaaaaaaaaaaaaaaaaaaaaaaaaaaaaaaaaaaaaaaaaaaaaaaaaaaaaaaaaaaaaaaaaaaaaaaaaaaa

SEQ ID NO: 1062 - RNA, 1236 nt, Artificial Sequence; identical to SEQ ID NO: 1061
  mRNA product Design i-3 (A100) comprising derived and/or modified sequence from RVA/Wa/P[8]__AAA66953.1__LumSynt_P2_VP8*(65-223) (opt4)

SEQ ID NO: 1063 - RNA, 1308 nt, Artificial Sequence
  mRNA product Design i-3 (A100) comprising derived and/or modified sequence from RVA/BE1058/P[4]__AEX30665.1__LumSynt_P2_VP8*(41-223) (opt4)
aggagaaagcuuaccaugcagaucuacgagggcaagcugaccgccgagggccugagauucggcaucguggccagcagauucaaccacgcccugguggacagacugguggagggcgccaucgacgccaucgugagacacggcggcagagaggaggacaucacccuggugagagugcccggcagcugggagauccccguggccgccggcgagcuggccagaaaggaggacaucgacgccgugaucgccaucggcgugcugaucagaggcgccaccccccacuucgacuacaucgccagcgaggugagcaagggccuggccgaccugagccuggagcugagaaagcccaucaccuucggcgugaucaccgccgacacccuggagcaggccaucgagagagccggcaccaagcacggcaacaagggcugggaggccgcccugagcgccaucgagauggccaaccuguucaagagccugagaggcggcagcggcggcagcggcggcagcggcggcagcggcggcggccaguacaucaaggccaacagcaaguucaucggcaucaccgagcugggcagcggcagcggcgcccagaccagauacgcccccgugaacuggggccacggcgagaucaacgacagcaccaccguggagcccgugcuggacggccccuaccagcccaccaccuucaagccccccaacgacuacuggcugcugaucagcagcaacaccgacggcgugguguacgagagcaccaacaacagcgacuucuggaccgccgugaucgccguggagccccacgugaaccagaccaacagacaguacgugcuguucggcgagaacaagcaguucaacaucgagaacagcagcgacaaguggaaguucuucgagauguucaagggcaacagccagagcgacuucagcaacagaagaacccugaccagcagcaacagacuggugggcaugcugaaguacggcggcagaguguggaccuuccacggcgagacccccagagccaccaccgacagcagcagcaccgccgaccugaacaacaucagcaucaucauccacagcgaguucuacaucauccccagaagccaggagagcaagugcaacgaguacaucaacaacggccugugaggacuaguuauaagacugacuagcccgaugggccucccaacgggcccuccuccccuccuugcaccgagauuaauaaaaaaaaaaaaaaaaaaaaaaaaaaaaaaaaaaaaaaaaaaaaaaaaaaaaaaaaaaaaaaaaaaaaaaaaaaaaaaaaaaaaaaaaaaaaaaaaaaaa

SEQ ID NO: 1064 - RNA, 1308 nt, Artificial Sequence
  mRNA product Design i-3 (A100) comprising derived and/or modified sequence from RVA/DS-1/P[4]__CAD62680.1__LumSynt_P2_VP8*(41-223) (opt4)
aggagaaagcuuaccaugcagaucuacgagggcaagcugaccgccgagggccugagauucggcaucguggccagcagauucaaccacgcccugguggacagacugguggagggcgccaucgacgccaucgugagacacggcggcagagaggaggacaucacccuggugagagugcccggcagcugggagauccccguggccgccggcgagcuggccagaaaggaggacaucgacgccgugaucgccaucggcgugcugaucagaggcgccaccccccacuucgacuacaucgccagcgaggugagcaagggccuggccgaccugagccuggagcugagaaagcccaucaccuucggcgugaucaccgccgacacccuggagcaggccaucgagagagccggcaccaagcacggcaacaagggcugggaggccgcccugagcgccaucgagauggccaaccuguucaagagccugagaggcggcagcggcggcagcggcggcagcggcggcagcggcggcggccaguacaucaaggccaacagcaaguucaucggcaucaccgagcugggcagcggcagcggcgcccagaccagauacgcccccgugaacuggggcagcugggagaucaacgacagcaccaccguggagcccgugcuggacggccccuaccagcccaccaccuucaagccccccaacgacuacuggcugcugaucagcagcaacaccaacggcgugguguacgagagcaccaacaacaacgacuucuggaccgccgugagcagcguggagccccacgugagccagaccaacagacaguacauccuguucggcgagaacaagcaguucaacguggagaacaacagcgacaaguggaaguucuucgagaccuucaccggcagcagccagggcaacuucagcaacagaagaacccugaccagcagcaacagacuggugggcaugcugaaguacggcggcagaguguggaccuuccacggcgagacccccagagccaccaccgacagcagcaacaccgccgaccugaacaacaucagcaucaucauccacagcgaguucuacaucauccccagaagccaggagagcaagugcaacgaguacaucaacaacggccugugaggacuaguuauaagacugacuagcccgaugggccucccaacgggcccuccuccccuccuugcaccgagauuaauaaaaaaaaaaaaaaaaaaaaaaaaaaaaaaaaaaaaaaaaaaaaaaaaaaaaaaaaaaaaaaaaaaaaaaaaaaaaaaaaaaaaaaaaaaaaaaaaaaaa

SEQ ID NO: 1065 - RNA, 1308 nt, Artificial Sequence; identical to SEQ ID NO: 1064
  mRNA product Design i-3 (A100) comprising derived and/or modified sequence from RVA/DS-1/P[4]__ABV53252.1__LumSynt_P2_VP8*(41-223) (opt4)

SEQ ID NO: 1066 - RNA, 1308 nt, Artificial Sequence
  mRNA product Design i-3 (A100) comprising derived and/or modified sequence from RVA/F01322/P[6]__AFA51886.1__LumSynt_P2_VP8*(41-223) (opt4)
aggagaaagcuuaccaugcagaucuacgagggcaagcugaccgccgagggccugagauucggcaucguggccagcagauucaaccacgcccugguggacagacugguggagggcgccaucgacgccaucgugagacacggcggcagagaggaggacaucacccuggugagagugcccggcagcugggagauccccguggccgccggcgagcuggccagaaaggaggacaucgacgccgugaucgccaucggcgugcugaucagaggcgccaccccccacuucgacuacaucgccagcgaggugagcaagggccuggccgaccugagccuggagcugagaaagcccaucaccuucggcgugaucaccgccgacacccuggagcaggccaucgagagagccggcaccaagcacggcaacaagggcugggaggccgcccugagcgccaucgagauggccaaccuguucaagagccugagaggcggcagcggcggcagcggcggcagcggcggcagcggcggcggccaguacaucaaggccaacagcaaguucaucggcaucaccgagcugggcagcggcagcggcgcccagaccaacuacgcccccgugaccuggagccacggcgaggugaacgacagcaccaccaucgagcccgugcuggacggccccuaccagcccaccaacuucaagccccccaacgacuacuggauccugcugaaccccaccaaccagcagguggugcuggagggcaccaacaagaccgacaucuggguggcccugcugcugguggagcccaacgugaccaaccagagcagacaguacacccuguucggcgagaccaagcagaucaccguggagaacaacaccaacaaguggaaguucuucgagauguucagaagcagcgugagcgccgaguuccagcacaagagaacccugaccagcgacaccaagcuggccggcuucaugaaguucuacaacagcguguggaccuuccacggcgagacccccaacgccaccaccgacuacagcagcaccagcaaccuguucgagguggagaccgugauccacguggaguucuacaucauccccagaagccaggagagcaagugcagcgaguacaucaacaccggccugugaggacuaguuauaagacugacuagcccgaugggccucccaacgggcccuccuccccuccuugcaccgagauuaauaaaaaaaaaaaaaaaaaaaaaaaaaaaaaaaaaaaaaaaaaaaaaaaaaaaaaaaaaaaaaaaaaaaaaaaaaaaaaaaaaaaaaaaaaaaaaaaaaaaa

SEQ ID NO: 1067 - RNA, 1308 nt, Artificial Sequence
  mRNA product Design i-3 (A100) comprising derived and/or modified sequence from RVA/1076/P[6]__AAA47337.1__LumSynt_P2_VP8*(41-223) (opt4)
aggagaaagcuuaccaugcagaucuacgagggcaagcugaccgccgagggccugagauucggcaucguggccagcagauucaaccacgcccugguggacagacugguggagggcgccaucgacgccaucgugagacacggcggcagagaggaggacaucacccuggugagagugcccggcagcugggagauccccguggccgccggcgagcuggccagaaaggaggacaucgacgccgugaucgccaucggcgugcugaucagaggcgccaccccccacuucgacuacaucgccagcgaggugagcaagggccuggccgaccugagccuggagcugagaaagcccaucaccuucggcgugaucaccgccgacacccuggagcaggccaucgagagagccggcaccaagcacggcaacaagggcugggaggccgcccugagcgccaucgagauggccaaccuguucaagagccugagaggcggcagcggcggcagcggcggcagcggcggcagcggcggcggccaguacaucaaggccaacagcaaguucaucggcaucaccgagcugggcagcggcagcggcgcccagaccaacuacgcccccgugaccuggagccacggcgaggugaacgacagcaccaccaucgagcccgugcuggacggccccuaccagcccaccagcuucaagccccccagcgacuacuggauccugcugaaccccaccaaccagcagguggugcuggagggcaccaacaagaccgacaucuggguggcccugcugcugguggagcccaacgugaccaaccagagcagacaguacacccuguucggcgagaccaagcagaucaccguggagaacaacaccaacaaguggaaguucuucgagauguucagaagcagcgugagcgccgaguuccagcacaagagaacccugaccagcgacaccaagcuggccggcuuccugaaguucuacaacagcguguggaccuucuacggcgagaccccccacgccaccaccgacuacagcagcaccagcaaccugagcgagguggagaccgccauccacguggaguucuacaucauccccagaagccaggagagcaagugcaacgaguacaucaacaccggccugugaggacuaguuauaagacugacuagcccgaugggccucccaacgggcccuccuccccuccuugcaccgagauuaauaaaaaaaaaaaaaaaaaaaaaaaaaaaaaaaaaaaaaaaaaaaaaaaaaaaaaaaaaaaaaaaaaaaaaaaaaaaaaaaaaaaaaaaaaaaaaaaaaaaa

SEQ ID NO: 1068 - RNA, 1308 nt, Artificial Sequence
  mRNA product Design i-3 (A100) comprising derived and/or modified sequence from RVA/BE1128/P[8]__AEX30671.1__LumSynt_P2_VP8*(41-223) (opt4)
aggagaaagcuuaccaugcagaucuacgagggcaagcugaccgccgagggccugagauucggcaucguggccagcagauucaaccacgcccugguggacagacugguggagggcgccaucgacgccaucgugagacacggcggcagagaggaggacaucacccuggugagagugcccggcagcugggagauccccguggccgccggcgagcuggccagaaaggaggacaucgacgccgugaucgccaucggcgugcugaucagaggcgccaccccccacuucgacuacaucgccagcgaggugagcaagggccuggccgaccugagccuggagcugagaaagcccaucaccuucggcgugaucaccgccgacacccuggagcaggccaucgagagagccggcaccaagcacggcaacaagggcugggaggccgcccugagcgccaucgagauggccaaccuguucaagagccugagaggcggcagcggcggcagcggcggcagcggcggcagcggcggcggccaguacaucaaggccaacagcaaguucaucggcaucaccgagcugggcagcggcagcggcgcccagaccagauacgcccccgugaacuggggccacggcgagaucaacgacagcaccaccguggagcccauccuggacggccccuaccagcccaccaccuucaccccccccaccgacuacuggauccugaucaccagcaacaccaacggcgugguguacgagagcaccaacaacagcgacuucuggaccgccgugaucgccguggagccccacgugaaccccguggacagacaguacaacguguucggcgagaacaagcaguucaacgugagaaacgacagcgacaaguggaaguuccuggagauguucagaggcagcagccagaacgacuucuacaacagaagaacccugaccagcgacaccagacuggugggcauccugaaguacggcggcagaguguggaccuuccacggcgagacccccagagccaccaccgacagcagcaacaccgccaaccuggacggcaucagcaucaccauccacagcgaguucuacaucauccccagaagccaggagagcaagugcaacgaguacaucaacaacggccugugaggacuaguuauaagacugacuagcccgaugggccucccaacgggcccuccuccccuccuugcaccgagauuaauaaaaaaaaaaaaaaaaaaaaaaaaaaaaaaaaaaaaaaaaaaaaaaaaaaaaaaaaaaaaaaaaaaaaaaaaaaaaaaaaaaaaaaaaaaaaaaaaaaaa

SEQ ID NO: 1069 - RNA, 1308 nt, Artificial Sequence
  mRNA product Design i-3 (A100) comprising derived and/or modified sequence from RVA/Wa-VirWa/P[8]__ACR22783.1__LumSynt_P2_VP8*(41-223) (opt4)
aggagaaagcuuaccaugcagaucuacgagggcaagcugaccgccgagggccugagauucggcaucguggccagcagauucaaccacgcccugguggacagacugguggagggcgccaucgacgccaucgugagacacggcggcagagaggaggacaucacccuggugagagugcccggcagcugggagauccccguggccgccggcgagcuggccagaaaggaggacaucgacgccgugaucgccaucggcgugcugaucagaggcgccaccccccacuucgacuacaucgccagcgaggugagcaagggccuggccgaccugagccuggagcugagaaagcccaucaccuucggcgugaucaccgccgacacccuggagcaggccaucgagagagccggcaccaagcacggcaacaagggcugggaggccgcccugagcgccaucgagauggccaaccuguucaagagccugagaggcggcagcggcggcagcggcggcagcggcggcagcggcggcggccaguacaucaaggccaacagcaaguucaucggcaucaccgagcugggcagcggcagcggcgcccagaccagauacgcccccgugaacuggggccacggcgagaucaacgacagcaccaccguggagcccauccuggacggccccuaccagcccaccaccuucaccccccccaacgacuacuggauccugaucaacagcaacaccaacggcgugguguacgagagcaccaacaacagcgacuucuggaccgccgugguggccaucgagccccacgugaaccccguggacagacaguacaccaucuucggcgagagcaagcaguucaacgugagaaacgacagcaacaaguggaaguuccuggagauguucagaagcagcagccagaacgaguucuacaacagaagaacccugaccagcgacaccagacuggugggcauccugaaguacggcggcagaguguggaccuuccacggcgagacccccagagccaccaccgacagcagcagcaccgccaaccugaacaacaucagcaucaccauccacagcgaguucuacaucauccccagaagccaggagagcaagugcaacgaguacaucaacaacggccugugaggacuaguuauaagacugacuagcccgaugggccucccaacgggcccuccuccccuccuugcaccgagauuaauaaaaaaaaaaaaaaaaaaaaaaaaaaaaaaaaaaaaaaaaaaaaaaaaaaaaaaaaaaaaaaaaaaaaaaaaaaaaaaaaaaaaaaaaaaaaaaaaaaaa

SEQ ID NO: 1070 - RNA, 1308 nt, Artificial Sequence
  mRNA product Design i-3 (A100) comprising derived and/or modified sequence from RVA/Wa/P[8]__AAA47290.1__LumSynt_P2_VP8*(41-223) (opt4)
aggagaaagcuuaccaugcagaucuacgagggcaagcugaccgccgagggccugagauucggcaucguggccagcagauucaaccacgcccugguggacagacugguggagggcgccaucgacgccaucgugagacacggcggcagagaggaggacaucacccuggugagagugcccggcagcugggagauccccguggccgccggcgagcuggccagaaaggaggacaucgacgccgugaucgccaucggcgugcugaucagaggcgccaccccccacuucgacuacaucgccagcgaggugagcaagggccuggccgaccugagccuggagcugagaaagcccaucaccuucggcgugaucaccgccgacacccuggagcaggccaucgagagagccggcaccaagcacggcaacaagggcugggaggccgcccugagcgccaucgagauggccaaccuguucaagagccugagaggcggcagcggcggcagcggcggcagcggcggcagcggcggcggccaguacaucaaggccaacagcaaguucaucggcaucaccgagcugggcagcggcagcggcgcccagaccagauacgcccccgugaacuggggccacggcgagaucaacgacagcaccaccguggagcccauccuggacggccccuaccagcccaccaccuucaccccccccaacgacuacuggauccugaucaacagcaacaccaacggcgugguguacgagagcaccaacaacagcgacuucuggaccgccgugguggccaucgagccccacgugaaccccguggacagacaguacaccaucuucggcgagagcaagcaguucaacgugagcaacgacagcaacaaguggaaguuccuggagauguucagaagcagcagccagaacgaguucuacaacagaagaacccugaccagcgacaccagauucgugggcauccugaaguacggcggcagaguguggaccuuccacggcgagacccccagagccaccaccgacagcagcagcaccgccaaccugaacaacaucagcaucaccauccacagcgaguucuacaucauccccagaagccaggagagcaagugcaacgaguacaucaacaacggccugugaggacuaguuauaagacugacuagcccgaugggccucccaacgggcccuccuccccuccuugcaccgagauuaauaaaaaaaaaaaaaaaaaaaaaaaaaaaaaaaaaaaaaaaaaaaaaaaaaaaaaaaaaaaaaaaaaaaaaaaaaaaaaaaaaaaaaaaaaaaaaaaaaaaa

SEQ ID NO: 1071 - RNA, 1308 nt, Artificial Sequence
  mRNA product Design i-3 (A100) comprising derived and/or modified sequence from RVA/Wa/P[8]__AAA66953.1__LumSynt_P2_VP8*(41-223) (opt4)
aggagaaagcuuaccaugcagaucuacgagggcaagcugaccgccgagggccugagauucggcaucguggccagcagauucaaccacgcccugguggacagacugguggagggcgccaucgacgccaucgugagacacggcggcagagaggaggacaucacccuggugagagugcccggcagcugggagauccccguggccgccggcgagcuggccagaaaggaggacaucgacgccgugaucgccaucggcgugcugaucagaggcgccaccccccacuucgacuacaucgccagcgaggugagcaagggccuggccgaccugagccuggagcugagaaagcccaucaccuucggcgugaucaccgccgacacccuggagcaggccaucgagagagccggcaccaagcacggcaacaagggcugggaggccgcccugagcgccaucgagauggccaaccuguucaagagccugagaggcggcagcggcggcagcggcggcagcggcggcagcggcggcggccaguacaucaaggccaacagcaaguucaucggcaucaccgagcugggcagcggcagcggcgcccagaccagauacgcccccgugaacuggggccacggcgagaucaacgacagcaccaccguggagcccaugcuggacggccccuaccagcccaccaccuucaccccccccaacgacuacuggauccugaucaacagcaacaccaacggcgugguguacgagagcaccaacaacagcgacuucuggaccgccgugguggccaucgagccccacgugaaccccguggacagacaguacaccaucuucggcgagagcaagcaguucaacgugagcaacgacagcaacaaguggaaguuccuggagauguucagaagcagcagccagaacgaguucuacaacagaagaacccugaccagcgacaccagauucgugggcauccugaaguacggcggcagaguguggaccuuccacggcgagacccccagagccaccaccgacagcagcagcaccgccaaccugaacaacaucagcaucaccauccacagcgaguucuacaucauccccagaagccaggagagcaagugcaacgaguacaucaacaacggccugugaggacuaguuauaagacugacuagcccgaugggccucccaacgggcccuccuccccuccuugcaccgagauuaauaaaaaaaaaaaaaaaaaaaaaaaaaaaaaaaaaaaaaaaaaaaaaaaaaaaaaaaaaaaaaaaaaaaaaaaaaaaaaaaaaaaaaaaaaaaaaaaaaaaa

SEQ ID NO: 1072 - RNA, 783 nt, Artificial Sequence
  mRNA product Design i-3 (A100) comprising derived and/or modified sequence from RVA/BE1058/P[4]__AEX30665.1__SP-IgE_P2_VP8*(65-223) (opt4)
aggagaaagcuuaccauggacuggaccuggauccuguuccugguggccgccgccaccagagugcacagccaguacaucaaggccaacagcaaguucaucggcaucaccgagcugggcagcggcagcggccuggacggccccuaccagcccaccaccuucaagccccccaacgacuacuggcugcugaucagcagcaacaccgacggcgugguguacgagagcaccaacaacagcgacuucuggaccgccgugaucgccguggagccccacgugaaccagaccaacagacaguacgugcuguucggcgagaacaagcaguucaacaucgagaacagcagcgacaaguggaaguucuucgagauguucaagggcaacagccagagcgacuucagcaacagaagaacccugaccagcagcaacagacuggugggcaugcugaaguacggcggcagaguguggaccuuccacggcgagacccccagagccaccaccgacagcagcagcaccgccgaccugaacaacaucagcaucaucauccacagcgaguucuacaucauccccagaagccaggagagcaagugcaacgaguacaucaacaacggccugugaggacuaguuauaagacugacuagcccgaugggccucccaacgggcccuccuccccuccuugcaccgagauuaauaaaaaaaaaaaaaaaaaaaaaaaaaaaaaaaaaaaaaaaaaaaaaaaaaaaaaaaaaaaaaaaaaaaaaaaaaaaaaaaaaaaaaaaaaaaaaaaaaaaa

SEQ ID NO: 1073 - RNA, 783 nt, Artificial Sequence
  mRNA product Design i-3 (A100) comprising derived and/or modified sequence from RVA/DS-1/P[4]__CAD62680.1__SP-IgE_P2_VP8*(65-223) (opt4)
aggagaaagcuuaccauggacuggaccuggauccuguuccugguggccgccgccaccagagugcacagccaguacaucaaggccaacagcaaguucaucggcaucaccgagcugggcagcggcagcggccuggacggccccuaccagcccaccaccuucaagccccccaacgacuacuggcugcugaucagcagcaacaccaacggcgugguguacgagagcaccaacaacaacgacuucuggaccgccgugagcagcguggagccccacgugagccagaccaacagacaguacauccuguucggcgagaacaagcaguucaacguggagaacaacagcgacaaguggaaguucuucgagaccuucaccggcagcagccagggcaacuucagcaacagaagaacccugaccagcagcaacagacuggugggcaugcugaaguacggcggcagaguguggaccuuccacggcgagacccccagagccaccaccgacagcagcaacaccgccgaccugaacaacaucagcaucaucauccacagcgaguucuacaucauccccagaagccaggagagcaagugcaacgaguacaucaacaacggccugugaggacuaguuauaagacugacuagcccgaugggccucccaacgggcccuccuccccuccuugcaccgagauuaauaaaaaaaaaaaaaaaaaaaaaaaaaaaaaaaaaaaaaaaaaaaaaaaaaaaaaaaaaaaaaaaaaaaaaaaaaaaaaaaaaaaaaaaaaaaaaaaaaaaa

SEQ ID NO: 1074 - RNA, 783 nt, Artificial Sequence; identical to SEQ ID NO: 1073
  mRNA product Design i-3 (A100) comprising derived and/or modified sequence from RVA/DS-1/P[4]__ABV53252.1__SP-IgE_P2_VP8*(65-223) (opt4)

SEQ ID NO: 1075 - RNA, 783 nt, Artificial Sequence
  mRNA product Design i-3 (A100) comprising derived and/or modified sequence from RVA/F01322/P[6]__AFA51886.1__SP-IgE_P2_VP8*(65-223) (opt4)
aggagaaagcuuaccauggacuggaccuggauccuguuccugguggccgccgccaccagagugcacagccaguacaucaaggccaacagcaaguucaucggcaucaccgagcugggcagcggcagcggccuggacggccccuaccagcccaccaacuucaagccccccaacgacuacuggauccugcugaaccccaccaaccagcagguggugcuggagggcaccaacaagaccgacaucuggguggcccugcugcugguggagcccaacgugaccaaccagagcagacaguacacccuguucggcgagaccaagcagaucaccguggagaacaacaccaacaaguggaaguucuucgagauguucagaagcagcgugagcgccgaguuccagcacaagagaacccugaccagcgacaccaagcuggccggcuucaugaaguucuacaacagcguguggaccuuccacggcgagacccccaacgccaccaccgacuacagcagcaccagcaaccuguucgagguggagaccgugauccacguggaguucuacaucauccccagaagccaggagagcaagugcagcgaguacaucaacaccggccugugaggacuaguuauaagacugacuagcccgaugggccucccaacgggcccuccuccccuccuugcaccgagauuaauaaaaaaaaaaaaaaaaaaaaaaaaaaaaaaaaaaaaaaaaaaaaaaaaaaaaaaaaaaaaaaaaaaaaaaaaaaaaaaaaaaaaaaaaaaaaaaaaaaaa

SEQ ID NO: 1076 - RNA, 783 nt, Artificial Sequence
  mRNA product Design i-3 (A100) comprising derived and/or modified sequence from RVA/1076/P[6]__AAA47337.1__SP-IgE_P2_VP8*(65-223) (opt4)
aggagaaagcuuaccauggacuggaccuggauccuguuccugguggccgccgccaccagagugcacagccaguacaucaaggccaacagcaaguucaucggcaucaccgagcugggcagcggcagcggccuggacggccccuaccagcccaccagcuucaagccccccagcgacuacuggauccugcugaaccccaccaaccagcagguggugcuggagggcaccaacaagaccgacaucuggguggcccugcugcugguggagcccaacgugaccaaccagagcagacaguacacccuguucggcgagaccaagcagaucaccguggagaacaacaccaacaaguggaaguucuucgagauguucagaagcagcgugagcgccgaguuccagcacaagagaacccugaccagcgacaccaagcuggccggcuuccugaaguucuacaacagcguguggaccuucuacggcgagaccccccacgccaccaccgacuacagcagcaccagcaaccugagcgagguggagaccgccauccacguggaguucuacaucauccccagaagccaggagagcaagugcaacgaguacaucaacaccggccugugaggacuaguuauaagacugacuagcccgaugggccucccaacgggcccuccuccccuccuugcaccgagauuaauaaaaaaaaaaaaaaaaaaaaaaaaaaaaaaaaaaaaaaaaaaaaaaaaaaaaaaaaaaaaaaaaaaaaaaaaaaaaaaaaaaaaaaaaaaaaaaaaaaaa

SEQ ID NO: 1077 - RNA, 783 nt, Artificial Sequence
  mRNA product Design i-3 (A100) comprising derived and/or modified sequence from RVA/BE1128/P[8]__AEX30671.1__SP-IgE_P2_VP8*(65-223) (opt4)
aggagaaagcuuaccauggacuggaccuggauccuguuccugguggccgccgccaccagagugcacagccaguacaucaaggccaacagcaaguucaucggcaucaccgagcugggcagcggcagcggccuggacggccccuaccagcccaccaccuucaccccccccaccgacuacuggauccugaucaccagcaacaccaacggcgugguguacgagagcaccaacaacagcgacuucuggaccgccgugaucgccguggagccccacgugaaccccguggacagacaguacaacguguucggcgagaacaagcaguucaacgugagaaacgacagcgacaaguggaaguuccuggagauguucagaggcagcagccagaacgacuucuacaacagaagaacccugaccagcgacaccagacuggugggcauccugaaguacggcggcagaguguggaccuuccacggcgagacccccagagccaccaccgacagcagcaacaccgccaaccuggacggcaucagcaucaccauccacagcgaguucuacaucauccccagaagccaggagagcaagugcaacgaguacaucaacaacggccugugaggacuaguuauaagacugacuagcccgaugggccucccaacgggcccuccuccccuccuugcaccgagauuaauaaaaaaaaaaaaaaaaaaaaaaaaaaaaaaaaaaaaaaaaaaaaaaaaaaaaaaaaaaaaaaaaaaaaaaaaaaaaaaaaaaaaaaaaaaaaaaaaaaaa

SEQ ID NO: 1078 - RNA, 783 nt, Artificial Sequence
  mRNA product Design i-3 (A100) comprising derived and/or modified sequence from RVA/Wa-VirWa/P[8]__ACR22783.1__SP-IgE_P2_VP8*(65-223) (opt4)
aggagaaagcuuaccauggacuggaccuggauccuguuccugguggccgccgccaccagagugcacagccaguacaucaaggccaacagcaaguucaucggcaucaccgagcugggcagcggcagcggccuggacggccccuaccagcccaccaccuucaccccccccaacgacuacuggauccugaucaacagcaacaccaacggcgugguguacgagagcaccaacaacagcgacuucuggaccgccgugguggccaucgagccccacgugaaccccguggacagacaguacaccaucuucggcgagagcaagcaguucaacgugagaaacgacagcaacaaguggaaguuccuggagauguucagaagcagcagccagaacgaguucuacaacagaagaacccugaccagcgacaccagacuggugggcauccugaaguacggcggcagaguguggaccuuccacggcgagacccccagagccaccaccgacagcagcagcaccgccaaccugaacaacaucagcaucaccauccacagcgaguucuacaucauccccagaagccaggagagcaagugcaacgaguacaucaacaacggccugugaggacuaguuauaagacugacuagcccgaugggccucccaacgggcccuccuccccuccuugcaccgagauuaauaaaaaaaaaaaaaaaaaaaaaaaaaaaaaaaaaaaaaaaaaaaaaaaaaaaaaaaaaaaaaaaaaaaaaaaaaaaaaaaaaaaaaaaaaaaaaaaaaaaa

SEQ ID NO: 1079 - RNA, 783 nt, Artificial Sequence
  mRNA product Design i-3 (A100) comprising derived and/or modified sequence from RVA/Wa/P[8]__AAA47290.1__SP-IgE_P2_VP8*(65-223) (opt4)
aggagaaagcuuaccauggacuggaccuggauccuguuccugguggccgccgccaccagagugcacagccaguacaucaaggccaacagcaaguucaucggcaucaccgagcugggcagcggcagcggccuggacggccccuaccagcccaccaccuucaccccccccaacgacuacuggauccugaucaacagcaacaccaacggcgugguguacgagagcaccaacaacagcgacuucuggaccgccgugguggccaucgagccccacgugaaccccguggacagacaguacaccaucuucggcgagagcaagcaguucaacgugagcaacgacagcaacaaguggaaguuccuggagauguucagaagcagcagccagaacgaguucuacaacagaagaacccugaccagcgacaccagauucgugggcauccugaaguacggcggcagaguguggaccuuccacggcgagacccccagagccaccaccgacagcagcagcaccgccaaccugaacaacaucagcaucaccauccacagcgaguucuacaucauccccagaagccaggagagcaagugcaacgaguacaucaacaacggccugugaggacuaguuauaagacugacuagcccgaugggccucccaacgggcccuccuccccuccuugcaccgagauuaauaaaaaaaaaaaaaaaaaaaaaaaaaaaaaaaaaaaaaaaaaaaaaaaaaaaaaaaaaaaaaaaaaaaaaaaaaaaaaaaaaaaaaaaaaaaaaaaaaaaa

SEQ ID NO: 1080 - RNA, 783 nt, Artificial Sequence; identical to SEQ ID NO: 1079
  mRNA product Design i-3 (A100) comprising derived and/or modified sequence from RVA/Wa/P[8]__AAA66953.1__SP-IgE_P2_VP8*(65-223) (opt4)

SEQ ID NO: 1081 - RNA, 855 nt, Artificial Sequence
  mRNA product Design i-3 (A100) comprising derived and/or modified sequence from RVA/BE1058/P[4]__AEX30665.1__SP-IgE_P2_VP8*(41-223) (opt4)
aggagaaagcuuaccauggacuggaccuggauccuguuccugguggccgccgccaccagagugcacagccaguacaucaaggccaacagcaaguucaucggcaucaccgagcugggcagcggcagcggcgcccagaccagauacgcccccgugaacuggggccacggcgagaucaacgacagcaccaccguggagcccgugcuggacggccccuaccagcccaccaccuucaagccccccaacgacuacuggcugcugaucagcagcaacaccgacggcgugguguacgagagcaccaacaacagcgacuucuggaccgccgugaucgccguggagccccacgugaaccagaccaacagacaguacgugcuguucggcgagaacaagcaguucaacaucgagaacagcagcgacaaguggaaguucuucgagauguucaagggcaacagccagagcgacuucagcaacagaagaacccugaccagcagcaacagacuggugggcaugcugaaguacggcggcagaguguggaccuuccacggcgagacccccagagccaccaccgacagcagcagcaccgccgaccugaacaacaucagcaucaucauccacagcgaguucuacaucauccccagaagccaggagagcaagugcaacgaguacaucaacaacggccugugaggacuaguuauaagacugacuagcccgaugggccucccaacgggcccuccuccccuccuugcaccgagauuaauaaaaaaaaaaaaaaaaaaaaaaaaaaaaaaaaaaaaaaaaaaaaaaaaaaaaaaaaaaaaaaaaaaaaaaaaaaaaaaaaaaaaaaaaaaaaaaaaaaaa

SEQ ID NO: 1082 - RNA, 855 nt, Artificial Sequence
  mRNA product Design i-3 (A100) comprising derived and/or modified sequence from RVA/DS-1/P[4]__CAD62680.1__SP-IgE_P2_VP8*(41-223) (opt4)
aggagaaagcuuaccauggacuggaccuggauccuguuccugguggccgccgccaccagagugcacagccaguacaucaaggccaacagcaaguucaucggcaucaccgagcugggcagcggcagcggcgcccagaccagauacgcccccgugaacuggggcagcugggagaucaacgacagcaccaccguggagcccgugcuggacggccccuaccagcccaccaccuucaagccccccaacgacuacuggcugcugaucagcagcaacaccaacggcgugguguacgagagcaccaacaacaacgacuucuggaccgccgugagcagcguggagccccacgugagccagaccaacagacaguacauccuguucggcgagaacaagcaguucaacguggagaacaacagcgacaaguggaaguucuucgagaccuucaccggcagcagccagggcaacuucagcaacagaagaacccugaccagcagcaacagacuggugggcaugcugaaguacggcggcagaguguggaccuuccacggcgagacccccagagccaccaccgacagcagcaacaccgccgaccugaacaacaucagcaucaucauccacagcgaguucuacaucauccccagaagccaggagagcaagugcaacgaguacaucaacaacggccugugaggacuaguuauaagacugacuagcccgaugggccucccaacgggcccuccuccccuccuugcaccgagauuaauaaaaaaaaaaaaaaaaaaaaaaaaaaaaaaaaaaaaaaaaaaaaaaaaaaaaaaaaaaaaaaaaaaaaaaaaaaaaaaaaaaaaaaaaaaaaaaaaaaaa

SEQ ID NO: 1083 - RNA, 855 nt, Artificial Sequence; identical to SEQ ID NO: 1082
  mRNA product Design i-3 (A100) comprising derived and/or modified sequence from RVA/DS-1/P[4]__ABV53252.1__SP-IgE_P2_VP8*(41-223) (opt4)

SEQ ID NO: 1084 - RNA, 855 nt, Artificial Sequence
  mRNA product Design i-3 (A100) comprising derived and/or modified sequence from RVA/F01322/P[6]__AFA51886.1__SP-IgE_P2_VP8*(41-223) (opt4)
aggagaaagcuuaccauggacuggaccuggauccuguuccugguggccgccgccaccagagugcacagccaguacaucaaggccaacagcaaguucaucggcaucaccgagcugggcagcggcagcggcgcccagaccaacuacgcccccgugaccuggagccacggcgaggugaacgacagcaccaccaucgagcccgugcuggacggccccuaccagcccaccaacuucaagccccccaacgacuacuggauccugcugaaccccaccaaccagcagguggugcuggagggcaccaacaagaccgacaucuggguggcccugcugcugguggagcccaacgugaccaaccagagcagacaguacacccuguucggcgagaccaagcagaucaccguggagaacaacaccaacaaguggaaguucuucgagauguucagaagcagcgugagcgccgaguuccagcacaagagaacccugaccagcgacaccaagcuggccggcuucaugaaguucuacaacagcguguggaccuuccacggcgagacccccaacgccaccaccgacuacagcagcaccagcaaccuguucgagguggagaccgugauccacguggaguucuacaucauccccagaagccaggagagcaagugcagcgaguacaucaacaccggccugugaggacuaguuauaagacugacuagcccgaugggccucccaacgggcccuccuccccuccuugcaccgagauuaauaaaaaaaaaaaaaaaaaaaaaaaaaaaaaaaaaaaaaaaaaaaaaaaaaaaaaaaaaaaaaaaaaaaaaaaaaaaaaaaaaaaaaaaaaaaaaaaaaaaa

SEQ ID NO: 1085 - RNA, 855 nt, Artificial Sequence
  mRNA product Design i-3 (A100) comprising derived and/or modified sequence from RVA/1076/P[6]__AAA47337.1__SP-IgE_P2_VP8*(41-223) (opt4)
aggagaaagcuuaccauggacuggaccuggauccuguuccugguggccgccgccaccagagugcacagccaguacaucaaggccaacagcaaguucaucggcaucaccgagcugggcagcggcagcggcgcccagaccaacuacgcccccgugaccuggagccacggcgaggugaacgacagcaccaccaucgagcccgugcuggacggccccuaccagcccaccagcuucaagccccccagcgacuacuggauccugcugaaccccaccaaccagcagguggugcuggagggcaccaacaagaccgacaucuggguggcccugcugcugguggagcccaacgugaccaaccagagcagacaguacacccuguucggcgagaccaagcagaucaccguggagaacaacaccaacaaguggaaguucuucgagauguucagaagcagcgugagcgccgaguuccagcacaagagaacccugaccagcgacaccaagcuggccggcuuccugaaguucuacaacagcguguggaccuucuacggcgagaccccccacgccaccaccgacuacagcagcaccagcaaccugagcgagguggagaccgccauccacguggaguucuacaucauccccagaagccaggagagcaagugcaacgaguacaucaacaccggccugugaggacuaguuauaagacugacuagcccgaugggccucccaacgggcccuccuccccuccuugcaccgagauuaauaaaaaaaaaaaaaaaaaaaaaaaaaaaaaaaaaaaaaaaaaaaaaaaaaaaaaaaaaaaaaaaaaaaaaaaaaaaaaaaaaaaaaaaaaaaaaaaaaaaa

SEQ ID NO: 1086 - RNA, 855 nt, Artificial Sequence
  mRNA product Design i-3 (A100) comprising derived and/or modified sequence from RVA/BE1128/P[8]__AEX30671.1__SP-IgE_P2_VP8*(41-223) (opt4)
aggagaaagcuuaccauggacuggaccuggauccuguuccugguggccgccgccaccagagugcacagccaguacaucaaggccaacagcaaguucaucggcaucaccgagcugggcagcggcagcggcgcccagaccagauacgcccccgugaacuggggccacggcgagaucaacgacagcaccaccguggagcccauccuggacggccccuaccagcccaccaccuucaccccccccaccgacuacuggauccugaucaccagcaacaccaacggcgugguguacgagagcaccaacaacagcgacuucuggaccgccgugaucgccguggagccccacgugaaccccguggacagacaguacaacguguucggcgagaacaagcaguucaacgugagaaacgacagcgacaaguggaaguuccuggagauguucagaggcagcagccagaacgacuucuacaacagaagaacccugaccagcgacaccagacuggugggcauccugaaguacggcggcagaguguggaccuuccacggcgagacccccagagccaccaccgacagcagcaacaccgccaaccuggacggcaucagcaucaccauccacagcgaguucuacaucauccccagaagccaggagagcaagugcaacgaguacaucaacaacggccugugaggacuaguuauaagacugacuagcccgaugggccucccaacgggcccuccuccccuccuugcaccgagauuaauaaaaaaaaaaaaaaaaaaaaaaaaaaaaaaaaaaaaaaaaaaaaaaaaaaaaaaaaaaaaaaaaaaaaaaaaaaaaaaaaaaaaaaaaaaaaaaaaaaaa

SEQ ID NO: 1087 - RNA, 855 nt, Artificial Sequence
  mRNA product Design i-3 (A100) comprising derived and/or modified sequence from RVA/Wa-VirWa/P[8]__ACR22783.1__SP-IgE_P2_VP8*(41-223) (opt4)
aggagaaagcuuaccauggacuggaccuggauccuguuccugguggccgccgccaccagagugcacagccaguacaucaaggccaacagcaaguucaucggcaucaccgagcugggcagcggcagcggcgcccagaccagauacgcccccgugaacuggggccacggcgagaucaacgacagcaccaccguggagcccauccuggacggccccuaccagcccaccaccuucaccccccccaacgacuacuggauccugaucaacagcaacaccaacggcgugguguacgagagcaccaacaacagcgacuucuggaccgccgugguggccaucgagccccacgugaaccccguggacagacaguacaccaucuucggcgagagcaagcaguucaacgugagaaacgacagcaacaaguggaaguuccuggagauguucagaagcagcagccagaacgaguucuacaacagaagaacccugaccagcgacaccagacuggugggcauccugaaguacggcggcagaguguggaccuuccacggcgagacccccagagccaccaccgacagcagcagcaccgccaaccugaacaacaucagcaucaccauccacagcgaguucuacaucauccccagaagccaggagagcaagugcaacgaguacaucaacaacggccugugaggacuaguuauaagacugacuagcccgaugggccucccaacgggcccuccuccccuccuugcaccgagauuaauaaaaaaaaaaaaaaaaaaaaaaaaaaaaaaaaaaaaaaaaaaaaaaaaaaaaaaaaaaaaaaaaaaaaaaaaaaaaaaaaaaaaaaaaaaaaaaaaaaaa

SEQ ID NO: 1088 - RNA, 855 nt, Artificial Sequence
  mRNA product Design i-3 (A100) comprising derived and/or modified sequence from RVA/Wa/P[8]__AAA47290.1__SP-IgE_P2_VP8*(41-223) (opt4)
aggagaaagcuuaccauggacuggaccuggauccuguuccugguggccgccgccaccagagugcacagccaguacaucaaggccaacagcaaguucaucggcaucaccgagcugggcagcggcagcggcgcccagaccagauacgcccccgugaacuggggccacggcgagaucaacgacagcaccaccguggagcccauccuggacggccccuaccagcccaccaccuucaccccccccaacgacuacuggauccugaucaacagcaacaccaacggcgugguguacgagagcaccaacaacagcgacuucuggaccgccgugguggccaucgagccccacgugaaccccguggacagacaguacaccaucuucggcgagagcaagcaguucaacgugagcaacgacagcaacaaguggaaguuccuggagauguucagaagcagcagccagaacgaguucuacaacagaagaacccugaccagcgacaccagauucgugggcauccugaaguacggcggcagaguguggaccuuccacggcgagacccccagagccaccaccgacagcagcagcaccgccaaccugaacaacaucagcaucaccauccacagcgaguucuacaucauccccagaagccaggagagcaagugcaacgaguacaucaacaacggccugugaggacuaguuauaagacugacuagcccgaugggccucccaacgggcccuccuccccuccuugcaccgagauuaauaaaaaaaaaaaaaaaaaaaaaaaaaaaaaaaaaaaaaaaaaaaaaaaaaaaaaaaaaaaaaaaaaaaaaaaaaaaaaaaaaaaaaaaaaaaaaaaaaaaa

SEQ ID NO: 1089 - RNA, 855 nt, Artificial Sequence
  mRNA product Design i-3 (A100) comprising derived and/or modified sequence from RVA/Wa/P[8]__AAA66953.1__SP-IgE_P2_VP8*(41-223) (opt4)
aggagaaagcuuaccauggacuggaccuggauccuguuccugguggccgccgccaccagagugcacagccaguacaucaaggccaacagcaaguucaucggcaucaccgagcugggcagcggcagcggcgcccagaccagauacgcccccgugaacuggggccacggcgagaucaacgacagcaccaccguggagcccaugcuggacggccccuaccagcccaccaccuucaccccccccaacgacuacuggauccugaucaacagcaacaccaacggcgugguguacgagagcaccaacaacagcgacuucuggaccgccgugguggccaucgagccccacgugaaccccguggacagacaguacaccaucuucggcgagagcaagcaguucaacgugagcaacgacagcaacaaguggaaguuccuggagauguucagaagcagcagccagaacgaguucuacaacagaagaacccugaccagcgacaccagauucgugggcauccugaaguacggcggcagaguguggaccuuccacggcgagacccccagagccaccaccgacagcagcagcaccgccaaccugaacaacaucagcaucaccauccacagcgaguucuacaucauccccagaagccaggagagcaagugcaacgaguacaucaacaacggccugugaggacuaguuauaagacugacuagcccgaugggccucccaacgggcccuccuccccuccuugcaccgagauuaauaaaaaaaaaaaaaaaaaaaaaaaaaaaaaaaaaaaaaaaaaaaaaaaaaaaaaaaaaaaaaaaaaaaaaaaaaaaaaaaaaaaaaaaaaaaaaaaaaaaa

SEQ ID NO: 1090 - RNA, 732 nt, Artificial Sequence
  mRNA product Design i-3 (A100) comprising derived and/or modified sequence from RVA/BE1058/P[4]__AEX30665.1__P2_VP8*(65-223) (opt5)
aggagaaagcuuaccaugcaguacaucaaggccaacagcaaauucauuggcaucaccgagcugggguccggaucuggccucgacgggcccuaucaaccuacaacguuuaagccgcccaaugauuacuggcugcuuauuagcuccaacaccgacggaguggucuaugaaucuacaaauaacagcgauuucuggaccgcuguuaucgccguggagccucacgugaaucagacaaacagacaguacguccuguuuggcgaaaauaaacaguucaacauugagaauagcucugacaaguggaaauuuuucgaaauguuuaaggggaacagccaauccgauuucagcaaucggcgcacccucacaucuuccaacagacuggugggaaugcuuaaguauggcggccggguuuggaccuuucauggggagacgccccgcgcgaccacagacuccucuuccaccgcugaucugaauaacaucagcaucauuauccacucugaguucuacauuaucccuagaucccaggaaagcaaaugcaaugaguauauuaacaacggacucugaggacuaguuauaagacugacuagcccgaugggccucccaacgggcccuccuccccuccuugcaccgagauuaauaaaaaaaaaaaaaaaaaaaaaaaaaaaaaaaaaaaaaaaaaaaaaaaaaaaaaaaaaaaaaaaaaaaaaaaaaaaaaaaaaaaaaaaaaaaaaaaaaaaa

SEQ ID NO: 1091 - RNA, 732 nt, Artificial Sequence
  mRNA product Design i-3 (A100) comprising derived and/or modified sequence from RVA/DS-1/P[4]__CAD62680.1__P2_VP8*(65-223) (opt5)
aggagaaagcuuaccaugcaguacaucaaggccaacagcaaauucauuggcaucaccgagcugggguccggaucuggccucgacgggcccuaucaaccuacaacguuuaagccgcccaaugauuacuggcugcuuauuagcuccaacaccaauggaguggucuaugaaucuacaaacaauaacgacuucuggaccgcuguuagcuccguggagccucacgugucucagacaaauagacaguacauccuguuuggcgaaaacaaacaguucaaugucgagaacaauagcgauaaguggaaauuuuucgaaaccuuuacaggguccagccaaggaaacuucucuaaucggcgcacccucacguccagcaacagacuggugggcaugcuuaaguauggcgggcggguuuggaccuuucauggagagacaccccgcgccaccacagacucuuccaauaccgcggaucugaacaacauuagcaucaucauucacucugaguucuacaucauuccuagaucccaggaaagcaagugcaaugaguauaucaacaauggccucugaggacuaguuauaagacugacuagcccgaugggccucccaacgggcccuccuccccuccuugcaccgagauuaauaaaaaaaaaaaaaaaaaaaaaaaaaaaaaaaaaaaaaaaaaaaaaaaaaaaaaaaaaaaaaaaaaaaaaaaaaaaaaaaaaaaaaaaaaaaaaaaaaaaa

SEQ ID NO: 1092 - RNA, 732 nt, Artificial Sequence; identical to SEQ ID NO: 1091
  mRNA product Design i-3 (A100) comprising derived and/or modified sequence from RVA/DS-1/P[4]__ABV53252.1__P2_VP8*(65-223) (opt5)

SEQ ID NO: 1093 - RNA, 732 nt, Artificial Sequence
  mRNA product Design i-3 (A100) comprising derived and/or modified sequence from RVA/F01322/P[6]__AFA51886.1__P2_VP8*(65-223) (opt5)
aggagaaagcuuaccaugcaguacaucaaggccaacagcaaauucauuggcaucaccgagcugggguccggaucuggccucgacgggcccuaucaaccuacaaauuuuaagccgcccaacgauuacuggauucugcuuaauccuacgaaccaacaggugguccuggaaggaaccaauaaaacagacaucuggguugcucuccugcuuguggagcccaacgugaccaaucagagcagacaguauacacuguucggcgaaaccaagcagauuacagucgagaacaauaccaacaaauggaaguuuuucgaaauguuucgguccucugugagcgccgaguuccagcacaagcgcacgcucaccuccgauacaaaacuggcgggguuuaugaaguucuacaauucuguuuggaccuuucauggagagacaccuaacgcuaccacggacuauagcuccacaagcaaucuguucgaaguggagaccgucauccacguggaauuuuacaucauucccagaucucaggaguccaaaugcagcgaguauaucaacacaggccucugaggacuaguuauaagacugacuagcccgaugggccucccaacgggcccuccuccccuccuugcaccgagauuaauaaaaaaaaaaaaaaaaaaaaaaaaaaaaaaaaaaaaaaaaaaaaaaaaaaaaaaaaaaaaaaaaaaaaaaaaaaaaaaaaaaaaaaaaaaaaaaaaaaaa

SEQ ID NO: 1094 - RNA, 732 nt, Artificial Sequence
  mRNA product Design i-3 (A100) comprising derived and/or modified sequence from RVA/1076/P[6]__AAA47337.1__P2_VP8*(65-223) (opt5)
aggagaaagcuuaccaugcaguacaucaaggccaacagcaaauucauuggcaucaccgagcugggguccggaucuggccucgacgggcccuaucaaccuacgagcuuuaagccgcccuccgauuacuggauucugcuuaauccuacaaaccaacaggugguccuggaaggaaccaauaaaacagacaucuggguugcucuccugcuuguggagcccaacgugaccaaucagucuagacaguauacacuguucggcgaaaccaagcagauuacagucgagaacaauaccaacaaauggaaguuuuucgaaauguuucggagcuccgugucugccgaguuccagcacaagcgcacgcucaccagcgauacaaaacuggcgggguuucugaaguucuacaauuccguuuggaccuuuuauggagagacaccucaugcuaccacggacuacagcucuacauccaaccucagcgaaguggagaccgccauccacgucgaguucuauaucauucccagaucucaggaauccaaaugcaaugaguacaucaacacaggccugugaggacuaguuauaagacugacuagcccgaugggccucccaacgggcccuccuccccuccuugcaccgagauuaauaaaaaaaaaaaaaaaaaaaaaaaaaaaaaaaaaaaaaaaaaaaaaaaaaaaaaaaaaaaaaaaaaaaaaaaaaaaaaaaaaaaaaaaaaaaaaaaaaaaa

SEQ ID NO: 1095 - RNA, 732 nt, Artificial Sequence
  mRNA product Design i-3 (A100) comprising derived and/or modified sequence from RVA/BE1128/P[8]__AEX30671.1__P2_VP8*(65-223) (opt5)
aggagaaagcuuaccaugcaguacaucaaggccaacagcaaauucauuggcaucaccgagcugggguccggaucuggccucgacgggcccuaucaaccuacaacguuuaccccgcccacagauuacuggauucugaucaccagcaauacaaacggaguggucuaugaauccaccaauaacucugacuucuggacagcuguuauugccguggagccucacgugaaucccgucgauagacaguacaacguguuuggcgaaaauaagcaguucaacguucggaaugacagcgauaaauggaaguuucuugagauguuccgcggguccucucagaacgacuuuuauaauagacggacccugacgagcgauacccgccucgugggaauccugaaauacggcggcagagucuggacauuccauggggaaaccccucgggcgacaaccgacuccagcaacacggcuaaucuugauggaaucucuauuacaauccacuccgaguuuuauauuaucccccgcagccaagagucuaagugcaacgaauacauuaauaacggccugugaggacuaguuauaagacugacuagcccgaugggccucccaacgggcccuccuccccuccuugcaccgagauuaauaaaaaaaaaaaaaaaaaaaaaaaaaaaaaaaaaaaaaaaaaaaaaaaaaaaaaaaaaaaaaaaaaaaaaaaaaaaaaaaaaaaaaaaaaaaaaaaaaaaa

SEQ ID NO: 1096 - RNA, 732 nt, Artificial Sequence
  mRNA product Design i-3 (A100) comprising derived and/or modified sequence from RVA/Wa-VirWa/P[8]__ACR22783.1__P2_VP8*(65-223) (opt5)
aggagaaagcuuaccaugcaguacaucaaggccaacagcaaauucauuggcaucaccgagcugggguccggaucuggccucgacgggcccuaucaaccuacaacguuuaccccgcccaaugauuacuggauucugaucaacagcaauacaaacggaguggucuaugaauccaccaauaacucugacuucuggacagcuguuguggccauugagccucacgugaaucccgucgauagacaguacaccaucuuuggcgaaagcaagcaguucaacgugcggaaugacuccaacaaauggaaguuucuugagauguuccgcucuagcucccagaaugaauuuuauaacagacggacacugaccagcgauacgcgccucguugggauccugaaauacggaggcagaguguggaccuuccauggcgagacaccucgggcgaccacagacucuuccagcaccgcuaaucuuaacaauauuucuaucacgauucacuccgaguuuuauaucauuccccgcagccaagaaucuaagugcaacgaguacaucaacaaugggcugugaggacuaguuauaagacugacuagcccgaugggccucccaacgggcccuccuccccuccuugcaccgagauuaauaaaaaaaaaaaaaaaaaaaaaaaaaaaaaaaaaaaaaaaaaaaaaaaaaaaaaaaaaaaaaaaaaaaaaaaaaaaaaaaaaaaaaaaaaaaaaaaaaaaa

SEQ ID NO: 1097 - RNA, 732 nt, Artificial Sequence
  mRNA product Design i-3 (A100) comprising derived and/or modified sequence from RVA/Wa/P[8]__AAA47290.1__P2_VP8*(65-223) (opt5)
aggagaaagcuuaccaugcaguacaucaaggccaacagcaaauucauuggcaucaccgagcugggguccggaucuggccucgacgggcccuaucaaccuacaacguuuaccccgcccaaugauuacuggauucugaucaacagcaauacaaacggaguggucuaugaauccaccaauaacucugacuucuggacagcuguuguggccauugagccucacgugaaucccgucgauagacaguacaccaucuuuggcgaaagcaagcaguucaacguguccaaugacucuaacaaauggaaguuucuugagauguuccggagcuccagccagaaugaauuuuauaaccgcagaacacugaccucugauacgcgguucguugggauccucaaauacggaggccgcguguggaccuuucauggcgagacaccuagagcgaccacagacuccagcucuaccgcuaaucugaacaauauuuccaucacgauucacagcgaguucuauaucauuccccggucucaagaauccaagugcaacgaguacaucaacaaugggcuuugaggacuaguuauaagacugacuagcccgaugggccucccaacgggcccuccuccccuccuugcaccgagauuaauaaaaaaaaaaaaaaaaaaaaaaaaaaaaaaaaaaaaaaaaaaaaaaaaaaaaaaaaaaaaaaaaaaaaaaaaaaaaaaaaaaaaaaaaaaaaaaaaaaaa

SEQ ID NO: 1098 - RNA, 732 nt, Artificial Sequence; identical to SEQ ID NO: 1097
  mRNA product Design i-3 (A100) comprising derived and/or modified sequence from RVA/Wa/P[8]__AAA66953.1__P2_VP8*(65-223) (opt5)

SEQ ID NO: 1099 - RNA, 804 nt, Artificial Sequence
  mRNA product Design i-3 (A100) comprising derived and/or modified sequence from RVA/BE1058/P[4]__AEX30665.1__P2_VP8*(41-223) (opt5)
aggagaaagcuuaccaugcaguacaucaaggccaacagcaaauucauuggcaucaccgagcugggguccggaucuggcgcucaaacaagauaugcccccgugaauugggggcacggagaaauuaacgacagcacgaccgucgagccuguucucgauggcccguaccagcccacaaccuuuaagccucccaaugacuauuggcugcuuaucuccucuaacacagauggggugguguacgaaagcaccaauaacuccgacuucuggacagcggucauugcuguggagccucauguuaaucagaccaaccggcaguaugugcuguuuggagaaaauaaacaauucaacaucgaaaauucuagcgauaaguggaaauuuuucgagauguuuaagggcaacucccagagcgacuucucuaaucgcagaacgcucaccuccagcaaccggcuggucggcaugcuuaaguacgggggacgcguguggacauuucacggcgagacccccagagccacaaccgauucuuccagcacggccgaccugaauaacaucucuauuaucauucauuccgaguucuauaucauuccucggagccaggaauccaaaugcaacgaguacaucaauaacgggcucugaggacuaguuauaagacugacuagcccgaugggccucccaacgggcccuccuccccuccuugcaccgagauuaauaaaaaaaaaaaaaaaaaaaaaaaaaaaaaaaaaaaaaaaaaaaaaaaaaaaaaaaaaaaaaaaaaaaaaaaaaaaaaaaaaaaaaaaaaaaaaaaaaaaa

SEQ ID NO: 1100 - RNA, 804 nt, Artificial Sequence
  mRNA product Design i-3 (A100) comprising derived and/or modified sequence from RVA/DS-1/P[4]__CAD62680.1__P2_VP8*(41-223) (opt5)
aggagaaagcuuaccaugcaguacaucaaggccaacagcaaauucauuggcaucaccgagcugggguccggaucuggcgcucaaacaagauaugcccccgugaauugggggagcugggaaauuaacgacuccacgaccgucgagccuguucucgauggaccguaccagcccacaaccuuuaagccucccaaugacuauuggcugcuuaucucuagcaacacaaauggcgugguguacgaauccaccaacaauaacgauuucuggacagcggucucuagcguggagccucacguuucccagaccaaucggcaguauauucuguuuggggaaaacaaacaauucaauguggagaacaauagcgacaaguggaaauuuuucgagacguuuaccggaucuucccagggcaacuucagcaaucgcagaacacucaccucuuccaaccggcuggucggcaugcuuaaguacgggggacgcguguggacauuucauggcgaaacccccagagcuacgacagauagcucuaacaccgccgaccugaauaacaucuccaucauuauccacagcgaguucuauauuaucccucggucccaggaaucuaagugcaaugaguacauuaacaaugggcucugaggacuaguuauaagacugacuagcccgaugggccucccaacgggcccuccuccccuccuugcaccgagauuaauaaaaaaaaaaaaaaaaaaaaaaaaaaaaaaaaaaaaaaaaaaaaaaaaaaaaaaaaaaaaaaaaaaaaaaaaaaaaaaaaaaaaaaaaaaaaaaaaaaaa

SEQ ID NO: 1101 - RNA, 804 nt, Artificial Sequence; identical to SEQ ID NO: 1100
  mRNA product Design i-3 (A100) comprising derived and/or modified sequence from RVA/DS-1/P[4]__ABV53252.1__P2_VP8*(41-223) (opt5)

SEQ ID NO: 1102 - RNA, 804 nt, Artificial Sequence
  mRNA product Design i-3 (A100) comprising derived and/or modified sequence from RVA/F01322/P[6]__AFA51886.1__P2_VP8*(41-223) (opt5)
aggagaaagcuuaccaugcaguacaucaaggccaacagcaaauucauuggcaucaccgagcugggguccggaucuggcgcucaaacaaauuaugcccccgugacguggagccacggggaagucaacgacuccaccacaauugagccuguucucgauggaccguaccagcccaccaauuuuaagccucccaacgacuauuggauccugcuuaauccuacaaaccaacagguggugcuggaaggcaccaauaaaacagauauuugggucgcgcuccugcuuguggagcccaacguuaccaaucagucuagacaguacacgcuguucggggaaaccaagcagaucacaguggagaacaauaccaacaaauggaaguuuuucgagauguuucggagcuccgucucugcugaguuccagcauaagcgcacacucaccagcgacacgaaacuggccggauuuaugaaguucuauaauuccguguggacauuucacggcgaaaccccuaacgccacaaccgauuacagcucuaccuccaaucuguucgaaguugagacagugauccaugucgaguuuuauauuaucccgagaagccaagaaucuaaaugcuccgaguacauuaacacgggccucugaggacuaguuauaagacugacuagcccgaugggccucccaacgggcccuccuccccuccuugcaccgagauuaauaaaaaaaaaaaaaaaaaaaaaaaaaaaaaaaaaaaaaaaaaaaaaaaaaaaaaaaaaaaaaaaaaaaaaaaaaaaaaaaaaaaaaaaaaaaaaaaaaaaa

SEQ ID NO: 1103 - RNA, 804 nt, Artificial Sequence
  mRNA product Design i-3 (A100) comprising derived and/or modified sequence from RVA/1076/P[6]__AAA47337.1__P2_VP8*(41-223) (opt5)
aggagaaagcuuaccaugcaguacaucaaggccaacagcaaauucauuggcaucaccgagcugggguccggaucuggcgcucaaacaaauuaugcccccgugacguggagccacggggaagucaacgacuccaccacaauugagccuguucucgauggaccguaccagcccaccucuuuuaagccucccagcgacuauuggauccugcuuaauccuacaaaccaacagguggugcuggaaggcaccaauaaaacagauauuugggucgcgcuccugcuuguggagcccaacguuaccaaucaguccagacaguacacgcuguucggggaaaccaagcagaucacaguggagaacaauaccaacaaauggaaguuuuucgagauguuucggucuagcgucuccgcugaguuccagcauaagcgcacacucaccagcgacacgaaacuggccggauuucugaaguucuauaauucuguguggacauuuuacggcgaaaccccucacgccacaaccgauuauuccagcaccucuaaccucuccgaaguugagacagcuauccauguggaguucuacauuaucccgagaagccaagaaucuaaaugcaaugaguacauuaacacgggccugugaggacuaguuauaagacugacuagcccgaugggccucccaacgggcccuccuccccuccuugcaccgagauuaauaaaaaaaaaaaaaaaaaaaaaaaaaaaaaaaaaaaaaaaaaaaaaaaaaaaaaaaaaaaaaaaaaaaaaaaaaaaaaaaaaaaaaaaaaaaaaaaaaaaa

SEQ ID NO: 1104 - RNA, 804 nt, Artificial Sequence
  mRNA product Design i-3 (A100) comprising derived and/or modified sequence from RVA/BE1128/P[8]__AEX30671.1__P2_VP8*(41-223) (opt5)
aggagaaagcuuaccaugcaguacaucaaggccaacagcaaauucauuggcaucaccgagcugggguccggaucuggcgcucaaacaagauaugcccccgugaauugggggcacggagaaauuaacgacagcacgaccgucgagccuauccucgauggcccguaccagcccacaaccuuuacaccucccaccgacuauuggauucugaucacauccaauaccaacgggguuguguacgaaucuacgaauaacagcgauuucuggaccgcggugaucgcugucgagccucaugugaaucccguugaccggcaguauaacguguuuggagaaaauaagcaguucaacguccgcaaugauuccgacaaauggaaguuucuugagauguucagaggcucuagccaaaacgauuuuuacaaucggcgcacacugaccuccgacacaagacucgugggcauucugaaauaugggggacggguuuggaccuuccacggcgagacgccucgcgccacaaccgauagcucuaacacagccaaucuugacgggaucuccauuaccauccauagcgaauuuuacauuaucccgagaucucaggaguccaagugcaacgaauacauuaacaauggacugugaggacuaguuauaagacugacuagcccgaugggccucccaacgggcccuccuccccuccuugcaccgagauuaauaaaaaaaaaaaaaaaaaaaaaaaaaaaaaaaaaaaaaaaaaaaaaaaaaaaaaaaaaaaaaaaaaaaaaaaaaaaaaaaaaaaaaaaaaaaaaaaaaaaa

SEQ ID NO: 1105 - RNA, 804 nt, Artificial Sequence
  mRNA product Design i-3 (A100) comprising derived and/or modified sequence from RVA/Wa-VirWa/P[8]__ACR22783.1__P2_VP8*(41-223) (opt5)
aggagaaagcuuaccaugcaguacaucaaggccaacagcaaauucauuggcaucaccgagcugggguccggaucuggcgcucaaacaagauaugcccccgugaauugggggcacggagaaauuaacgacagcacgaccgucgagccuauccucgauggcccguaccagcccacaaccuuuacaccucccaaugacuauuggauucugaucaacuccaauaccaacgggguuguguacgaaucuacaaauaacagcgauuucuggaccgcgguggucgcuaucgagccucaugugaaucccguugaccggcaguauacgauuuuuggagaauccaagcaguucaacgugcgcaaugauucuaacaaauggaaguuucuugagauguucagaagcuccagccaaaaugaguuuuacaaccggcgcacccugacaucugacaccagacucgucggcauccugaaauauggcgggcggguguggacauuccacggagaaaccccucgcgccacgacagauuccagcucuaccgccaaucuuaacaacauuuccaucacaauucauagcgaguuuuacaucauuccgagaucucaggaauccaagugcaaugaguacaucaacaauggccugugaggacuaguuauaagacugacuagcccgaugggccucccaacgggcccuccuccccuccuugcaccgagauuaauaaaaaaaaaaaaaaaaaaaaaaaaaaaaaaaaaaaaaaaaaaaaaaaaaaaaaaaaaaaaaaaaaaaaaaaaaaaaaaaaaaaaaaaaaaaaaaaaaaaa

SEQ ID NO: 1106 - RNA, 804 nt, Artificial Sequence
  mRNA product Design i-3 (A100) comprising derived and/or modified sequence from RVA/Wa/P[8]__AAA47290.1__P2_VP8*(41-223) (opt5)
aggagaaagcuuaccaugcaguacaucaaggccaacagcaaauucauuggcaucaccgagcugggguccggaucuggcgcucaaacaagauaugcccccgugaauugggggcacggagaaauuaacgacagcacgaccgucgagccuauccucgauggcccguaccagcccacaaccuuuacaccucccaaugacuauuggauucugaucaacuccaauaccaacgggguuguguacgaaucuacaaauaacagcgauuucuggaccgcgguggucgcuaucgagccucaugugaaucccguugaccggcaguauacgauuuuuggagaauccaagcaguucaacgugucuaaugauagcaacaaauggaaguuucuugagauguuccgcuccagcucucaaaaugaguuuuacaacagacggacccugacauccgacacccgcuucgucggcauccucaaauauggcgggagaguguggacauuucacggagaaaccccucgggccacgacagauucuagcuccaccgccaaucugaacaacauuagcaucacaauucauucugaguucuacaucauuccgcgcucccaggaaagcaagugcaaugaguacaucaacaauggccuuugaggacuaguuauaagacugacuagcccgaugggccucccaacgggcccuccuccccuccuugcaccgagauuaauaaaaaaaaaaaaaaaaaaaaaaaaaaaaaaaaaaaaaaaaaaaaaaaaaaaaaaaaaaaaaaaaaaaaaaaaaaaaaaaaaaaaaaaaaaaaaaaaaaaa

SEQ ID NO: 1107 - RNA, 804 nt, Artificial Sequence
  mRNA product Design i-3 (A100) comprising derived and/or modified sequence from RVA/Wa/P[8]__AAA66953.1__P2_VP8*(41-223) (opt5)
aggagaaagcuuaccaugcaguacaucaaggccaacagcaaauucauuggcaucaccgagcugggguccggaucuggcgcucaaacaagauaugcccccgugaauugggggcacggagaaauuaacgacagcacgaccgucgagccuaugcucgauggcccguaccagcccacaaccuuuacaccucccaaugacuauuggauccugauuaacuccaauaccaacgggguuguguacgaaucuacaaauaacagcgauuucuggaccgcgguggucgcuaucgagccucaugugaaucccguugaccggcaguauacgaucuuuggagaauccaagcaguucaacgugucuaaugauagcaacaaauggaaguuucuugagauguuccgcuccagcucucaaaaugaguuuuacaacagacggacccugacauccgacacccgcuucgucggcauucucaaauauggcgggagaguguggacauuucacggagaaaccccucgggccacgacagauucuagcuccaccgccaaucugaacaacaucagcauuacaauccauucugaguucuacauuaucccgcgcucccaggaaagcaagugcaaugaguacauuaacaauggccuuugaggacuaguuauaagacugacuagcccgaugggccucccaacgggcccuccuccccuccuugcaccgagauuaauaaaaaaaaaaaaaaaaaaaaaaaaaaaaaaaaaaaaaaaaaaaaaaaaaaaaaaaaaaaaaaaaaaaaaaaaaaaaaaaaaaaaaaaaaaaaaaaaaaaa

SEQ ID NO: 1108 - RNA, 1230 nt, Artificial Sequence
  mRNA product Design i-3 (A100) comprising derived and/or modified sequence from RVA/BE1058/P[4]__AEX30665.1__P2_VP8*(65-223)_Ferritin (opt5)
aggagaaagcuuaccaugcaguacaucaaggccaacagcaaauucauuggcaucaccgagcugggguccggaucuggccucgacgggcccuaucaaccuacaacguuuaagccgcccaaugauuacuggcugcuuauuagcuccaacaccgacggaguggucuaugaaucuacaaauaacagcgauuucuggaccgcuguuaucgccguggagccucacgugaaucagacaaacagacaguacguccuguuuggcgaaaauaaacaguucaacauugagaauagcucugacaaguggaaauuuuucgaaauguuuaaggggaacagccaauccgauuucagcaaucggcgcacccucacaucuuccaacagacuggugggaaugcuuaaguauggcggccggguuuggaccuuucauggggagacgccccgcgcgaccacagacuccucuuccaccgcugaucugaauaacaucagcaucauuauccacucugaguucuacauuaucccuagaucccaggaaagcaaaugcaaugaguauauuaacaacggacucuccggcggggacaucauuaagcugcugaaugaacaggugaacaaagagaugcagucuagcaaucucuacauguccaugagcucuugguguuacacacauucccuggauggagccggccuuuuucuguucgaccacgccgcugaggaauaugagcaugccaagaaacucaucaucuuucugaacgaaaauaacguccccgugcaacuuaccagcauuucugcuccugagcacaaguucgaagggcugacgcagaucuuccagaaggccuacgagcacgagcagcauauuagcgaauccaucaauaacauuguugaucacgcgaucaaaucuaaggaccaugccacauuuaauuuccuccaaugguauguggcugagcagcacgaagaggaaguccuguuuaaagauauccuggacaagauugagcucaucggaaacgagaaucacggccuguaccuugccgaccaguaugugaaaggcauugcuaagagccggaaauccugaggacuaguuauaagacugacuagcccgaugggccucccaacgggcccuccuccccuccuugcaccgagauuaauaaaaaaaaaaaaaaaaaaaaaaaaaaaaaaaaaaaaaaaaaaaaaaaaaaaaaaaaaaaaaaaaaaaaaaaaaaaaaaaaaaaaaaaaaaaaaaaaaaaa

SEQ ID NO: 1109 - RNA, 1230 nt, Artificial Sequence
  mRNA product Design i-3 (A100) comprising derived and/or modified sequence from RVA/DS-1/P[4]__CAD62680.1__P2_VP8*(65-223)_Ferritin (opt5)
aggagaaagcuuaccaugcaguacaucaaggccaacagcaaauucauuggcaucaccgagcugggguccggaucuggccucgacgggcccuaucaaccuacaacguuuaagccgcccaaugauuacuggcugcuuauuagcuccaacaccaauggaguggucuaugaaucuacaaacaauaacgacuucuggaccgcuguuagcuccguggagccucacgugucucagacaaauagacaguacauccuguuuggcgaaaacaaacaguucaaugucgagaacaauagcgauaaguggaaauuuuucgaaaccuuuacaggguccagccaaggaaacuucucuaaucggcgcacccucacguccagcaacagacuggugggcaugcuuaaguauggcgggcggguuuggaccuuucauggagagacaccccgcgccaccacagacucuuccaauaccgcggaucugaacaacauuagcaucaucauucacucugaguucuacaucauuccuagaucccaggaaagcaagugcaaugaguauaucaacaauggccucuccgggggagacauuaucaaacugcugaacgaacaggugaauaaggagaugcagucuagcaaccucuacauguccaugagcucuugguguuacacgcauucccuggauggcgcugggcuuuuucuguucgaccacgccgccgaggaauaugagcaugcuaaaaagcucauuaucuuucugaaugaaaacaauguccccgugcaacuuacaagcaucucugccccugagcacaaauucgaaggacugacccagauuuuccagaaggcuuacgagcacgagcagcauaucagcgaauccauuaacaauaucguugaucacgccauuaagucuaaagaccaugcgacauuuaacuuccuccaaugguauguggccgagcagcacgaagaggaaguccuguuuaaggauauccuggacaaaaucgagcucauuggcaaugagaaccacggccuguaccuugcugaucaguaugugaaggggaucgccaaaagccggaaguccugaggacuaguuauaagacugacuagcccgaugggccucccaacgggcccuccuccccuccuugcaccgagauuaauaaaaaaaaaaaaaaaaaaaaaaaaaaaaaaaaaaaaaaaaaaaaaaaaaaaaaaaaaaaaaaaaaaaaaaaaaaaaaaaaaaaaaaaaaaaaaaaaaaaa

SEQ ID NO: 1110 - RNA, 1230 nt, Artificial Sequence; identical to SEQ ID NO: 1109
  mRNA product Design i-3 (A100) comprising derived and/or modified sequence from RVA/DS-1/P[4]__ABV53252.1__P2_VP8*(65-223)_Ferritin (opt5)

SEQ ID NO: 1111 - RNA, 1230 nt, Artificial Sequence
  mRNA product Design i-3 (A100) comprising derived and/or modified sequence from RVA/F01322/P[6]__AFA51886.1__P2_VP8*(65-223)_Ferritin (opt5)
aggagaaagcuuaccaugcaguacaucaaggccaacagcaaauucauuggcaucaccgagcugggguccggaucuggccucgacgggcccuaucaaccuacaaauuuuaagccgcccaacgauuacuggauucugcuuaauccuacgaaccaacaggugguccuggaaggaaccaauaaaacagacaucuggguugcucuccugcuuguggagcccaacgugaccaaucagagccggcaguauacacuguucggcgaaaccaagcagauuacagucgagaacaauaccaacaaauggaaguuuuucgaaauguuucgguccucugugagcgccgaguuccagcacaagcgcacgcucaccuccgauacaaaacuggcgggguuuaugaaguucuacaauucuguuuggaccuuucauggagagacaccuaacgcuaccacggacuauagcuccacaagcaaucuguucgaaguggagaccgucauccacguggaauuuuacaucauucccagaucucaggaguccaaaugcagcgaguauaucaacacaggccucucuggcggggauauuaucaagcugcuuaaugaacaaguuaacaaagagaugcaguccagcaaccuguacaugucuauguccagcugguguuacacccauucccucgacggagccggccuguuccuuuuugaucacgccgcugaagaguaugaacaugccaagaagcugauuaucuuccucaaugagaacaaugugccuguccagcugaccucuauuagcgcuccggagcacaaauucgaagggcugacacagaucuuucaaaaggccuacgagcacgaacagcauaucuccgagagcauuaacaauaucguggaccacgcgauuaaaucuaaggaucaugccacguucaacuuucuccagugguauguggcugaacaacacgaggaggaaguccuguucaaagacauccuugauaagauugagcugaucggaaaugaaaaccacggccucuaccuggccgaccaguauguuaaagggaucgcuaaguccagaaagagcugaggacuaguuauaagacugacuagcccgaugggccucccaacgggcccuccuccccuccuugcaccgagauuaauaaaaaaaaaaaaaaaaaaaaaaaaaaaaaaaaaaaaaaaaaaaaaaaaaaaaaaaaaaaaaaaaaaaaaaaaaaaaaaaaaaaaaaaaaaaaaaaaaaaa

SEQ ID NO: 1112 - RNA, 1230 nt, Artificial Sequence
  mRNA product Design i-3 (A100) comprising derived and/or modified sequence from RVA/1076/P[6]__AAA47337.1__P2_VP8*(65-223)_Ferritin (opt5)
aggagaaagcuuaccaugcaguacaucaaggccaacagcaaauucauuggcaucaccgagcugggguccggaucuggccucgacgggcccuaucaaccuacgagcuuuaagccgcccuccgauuacuggauucugcuuaauccuacaaaccaacaggugguccuggaaggaaccaauaaaacagacaucuggguugcucuccugcuuguggagcccaacgugaccaaucagucucggcaguauacacuguucggcgaaaccaagcagauuacagucgagaacaauaccaacaaauggaaguuuuucgaaauguuucggagcuccgugucugccgaguuccagcacaagcgcacgcucaccagcgauacaaaacuggcgggguuucugaaguucuacaauuccguuuggaccuuuuauggagagacaccucaugcuaccacggacuacagcucuacauccaaccucagcgaaguggagaccgccauccacgucgaguucuauaucauucccagaucucaggaauccaaaugcaaugaguacaucaacacaggccugagcggcggggauauuaucaaacuucugaaugaacaagugaacaaggagaugcagucuuccaaucucuacaugagcauguccucuugguguuauacccauagccuggacggagccggccuuuuucuguucgaucacgcugccgaagaguacgaacaugcuaagaagcucauuaucuuucugaacgagaacaauguuccugugcagcugaccuccauuagcgccccggagcacaaauucgaagggcucacacagaucuuccaaaaggcguaugagcacgaacagcauaucucugaguccauuaacaauaucgucgaccacgccauuaaaagcaaggaucaugcuacguuuaacuuccugcagugguacguggccgaacaacacgaggaggaagugcuuuuuaaagacauccuggauaagauugagcucaucggaaaugaaaaccacggccuguaucuugcugaccaguacgucaaagggaucgccaagucuagaaagagcugaggacuaguuauaagacugacuagcccgaugggccucccaacgggcccuccuccccuccuugcaccgagauuaauaaaaaaaaaaaaaaaaaaaaaaaaaaaaaaaaaaaaaaaaaaaaaaaaaaaaaaaaaaaaaaaaaaaaaaaaaaaaaaaaaaaaaaaaaaaaaaaaaaaa

SEQ ID NO: 1113 - RNA, 1230 nt, Artificial Sequence
  mRNA product Design i-3 (A100) comprising derived and/or modified sequence from RVA/BE1128/P[8]__AEX30671.1__P2_VP8*(65-223)_Ferritin (opt5)
aggagaaagcuuaccaugcaguacaucaaggccaacagcaaauucauuggcaucaccgagcugggguccggaucuggccucgacgggcccuaucaaccuacaacguuuaccccgcccacagauuacuggauucugaucaccagcaauacaaacggaguggucuaugaauccaccaauaacucugacuucuggacagcuguuauugccguggagccucacgugaaucccgucgauagacaguacaacguguuuggcgaaaauaagcaguucaacguucggaaugacagcgauaaauggaaguuucuugagauguuccgcggguccucucagaacgacuuuuauaauagacggacccugacgagcgauacccgccucgugggaauccugaaauacggcggcagagucuggacauuccauggggaaaccccucgggcgacaaccgacuccagcaacacggcuaaucuugauggaaucucuauuacaauccacuccgaguuuuauauuaucccccgcagccaagagucuaagugcaacgaauacauuaauaacggccuguccgggggagacaucauuaagcuccugaacgaacaggugaauaaagagaugcagagcucuaaccuguacauguccaugagcuccugguguuauacccauucucucgauggcgccgggcuguuccuuuuugaccacgccgcugaggaguacgaacaugccaagaaacugaucaucuuccucaaugagaacaauguuccugugcagcugacaagcauuuccgcuccggaacacaaguuugagggacuuacccaaaucuuccagaaagccuaugaacacgagcagcauauuagcgagucuaucaacaauauugucgaucacgcgaucaaguccaaggaccaugccaccuucaacuuucugcagugguacguggcugaacaacacgaggaagagguccucuucaaagacauccuggauaagauugaacugaucggcaaugagaaccacggccucuaucuggccgaccaguacgugaaagggauugcuaagagcagaaaaucuugaggacuaguuauaagacugacuagcccgaugggccucccaacgggcccuccuccccuccuugcaccgagauuaauaaaaaaaaaaaaaaaaaaaaaaaaaaaaaaaaaaaaaaaaaaaaaaaaaaaaaaaaaaaaaaaaaaaaaaaaaaaaaaaaaaaaaaaaaaaaaaaaaaaa

SEQ ID NO: 1114 - RNA, 1230 nt, Artificial Sequence
  mRNA product Design i-3 (A100) comprising derived and/or modified sequence from RVA/Wa-VirWa/P[8]__ACR22783.1__P2_VP8*(65-223)_Ferritin (opt5)
aggagaaagcuuaccaugcaguacaucaaggccaacagcaaauucauuggcaucaccgagcugggguccggaucuggccucgacgggcccuaucaaccuacaacguuuaccccgcccaaugauuacuggauucugaucaacagcaauacaaacggagugguguaugaauccaccaauaacucugacuucuggacagcuguuguggccauugagccucacgugaaucccgucgauagacaguacaccaucuuuggcgaaagcaagcaguucaacgugcggaaugacuccaacaaauggaaguuucuugagauguuccgcucuagcucccagaaugaauuuuauaacagacggacacugaccagcgauacgcgccucguugggauccugaaauacggaggcagaguguggaccuuccauggcgagacaccucgggcgaccacagacucuuccagcaccgcuaaucuuaacaauauuucuaucacgauucacuccgaguuuuauaucauuccccgcagccaagaaucuaagugcaacgaguacaucaacaaugggcuguccggaggcgauauuaucaagcuccugaacgaacaggucaauaaagagaugcagagcuccaaccuguacaugucuaugagcuccugguguuauacacauagccucgacggggccggacuguuccuuuuugaucacgccgcugaggaauacgagcaugccaagaaacugaucauuuuccucaaugaaaacaaugugccuguucagcugaccucuaucuccgcuccggagcacaaguuugaaggccuuacacaaauuuuccagaaagccuaugagcacgagcagcauaucagcgaaucuauuaacaauaucguggaccacgcgaucaagagcaaggaucaugccaccuucaacuuucugcagugguacgucgcugagcaacacgaagaggaaguccucuucaaagacauucuggauaagaucgagcugauugggaaugagaaccacggacucuaucuggccgaccaguacgugaaaggcaucgcuaaguccagaaaaucuugaggacuaguuauaagacugacuagcccgaugggccucccaacgggcccuccuccccuccuugcaccgagauuaauaaaaaaaaaaaaaaaaaaaaaaaaaaaaaaaaaaaaaaaaaaaaaaaaaaaaaaaaaaaaaaaaaaaaaaaaaaaaaaaaaaaaaaaaaaaaaaaaaaaa

SEQ ID NO: 1115 - RNA, 1230 nt, Artificial Sequence
  mRNA product Design i-3 (A100) comprising derived and/or modified sequence from RVA/Wa/P[8]__AAA47290.1__P2_VP8*(65-223)_Ferritin (opt5)
aggagaaagcuuaccaugcaguacaucaaggccaacagcaaauucauuggcaucaccgagcugggguccggaucuggccucgacgggcccuaucaaccuacaacguuuaccccgcccaaugauuacuggauucugaucaacagcaauacaaacggaguggucuaugaauccaccaauaacucugacuucuggacagcuguuguggccauugagccucacgugaaucccgucgauagacaguacaccaucuuuggcgaaagcaagcaguucaacguguccaaugacucuaacaaauggaaguuucuugagauguuccggagcuccagccagaaugaauuuuauaaccgcagaacacugaccucugauacgcgguucguugggauccucaaauacggaggccgcguguggaccuuucauggcgagacaccuagagcgaccacagacuccagcucuaccgcuaaucugaacaauauuuccaucacgauucacagcgaguucuauaucauuccccggucucaagaauccaagugcaacgaguacaucaacaaugggcuuagcggaggcgauauuaucaagcugcucaacgaacaggucaauaaagagaugcaguccucuaaccuguacaugagcauguccagcugguguuauacacauucucuggacggggccggacucuuucuguucgaucacgccgcugaggaauacgagcaugccaagaaacuuaucauuuuucugaaugaaaacaaugugccuguucagcucaccuccaucagcgcuccggagcacaaguucgaaggccugacacaaauuuuccagaaagccuaugagcacgagcagcauaucucugaaagcauuaacaauaucguggaccacgcgaucaaguccaaggaucaugccaccuuuaacuuccuucagugguacgucgcugagcaacacgaagaggaagugcuguuuaaagacauucucgauaagaucgagcugauugggaaugagaaccacggacuguaucucgccgaccaguacgugaaaggcaucgcuaagucucgcaaaagcugaggacuaguuauaagacugacuagcccgaugggccucccaacgggcccuccuccccuccuugcaccgagauuaauaaaaaaaaaaaaaaaaaaaaaaaaaaaaaaaaaaaaaaaaaaaaaaaaaaaaaaaaaaaaaaaaaaaaaaaaaaaaaaaaaaaaaaaaaaaaaaaaaaaa

SEQ ID NO: 1116 - RNA, 1230 nt, Artificial Sequence; identical to SEQ ID NO: 1115
  mRNA product Design i-3 (A100) comprising derived and/or modified sequence from RVA/Wa/P[8]__AAA66953.1__P2_VP8*(65-223)_Ferritin (opt5)

SEQ ID NO: 1117 - RNA, 1302 nt, Artificial Sequence
  mRNA product Design i-3 (A100) comprising derived and/or modified sequence from RVA/BE1058/P[4]__AEX30665.1__P2_VP8*(41-223)_Ferritin (opt5)
aggagaaagcuuaccaugcaguacaucaaggccaacagcaaauucauuggcaucaccgagcugggguccggaucuggcgcucaaacaagauaugcccccgugaauugggggcacggagaaauuaacgacagcacgaccgucgagccuguucucgauggcccguaccagcccacaaccuuuaagccucccaaugacuauuggcugcuuaucuccucuaacacagauggggugguguacgaaagcaccaauaacuccgacuucuggacagcggucauugcuguggagccucauguuaaucagaccaaccggcaguaugugcuguuuggagaaaauaaacaauucaacaucgaaaauucuagcgauaaguggaaauuuuucgagauguuuaagggcaacucccagagcgacuucucuaaucgcagaacgcucaccuccagcaaccggcuggucggcaugcuuaaguacgggggacgcguguggacauuucacggcgagacccccagagccacaaccgauucuuccagcacggccgaccugaauaacaucucuauuaucauucauuccgaguucuauaucauuccucggagccaggaauccaaaugcaacgaguacaucaauaacgggcucucuggaggcgauauuaucaagcugcugaaugagcagguuaacaaagaaaugcaaagcuccaaucucuacaugagcaugucuuccugguguuauacacacagccuggacggggcuggacuuuuucuguucgaucaugccgcugaggaauacgagcacgccaagaaacucaucauuuuucugaacgaaaauaacgugccgguccagcuuaccucuaucagcgcgcccgagcacaaguucgagggccugacacagauuuuccagaaggccuaugaacaugagcaacacaucuccgaaucuauuaauaacaucguggaccaugcuaucaaaagcaaggaucacgccaccuuuaauuuccuccagugguacguggcugagcagcacgaagaggagguccuguuuaaagacauucuggacaagaucgaacucauuggcaacgagaaucaugggcuguaucuugccgaucaauacguuaaaggaaucgcgaagucccgcaaaagcugaggacuaguuauaagacugacuagcccgaugggccucccaacgggcccuccuccccuccuugcaccgagauuaauaaaaaaaaaaaaaaaaaaaaaaaaaaaaaaaaaaaaaaaaaaaaaaaaaaaaaaaaaaaaaaaaaaaaaaaaaaaaaaaaaaaaaaaaaaaaaaaaaaaa

SEQ ID NO: 1118 - RNA, 1302 nt, Artificial Sequence
  mRNA product Design i-3 (A100) comprising derived and/or modified sequence from RVA/DS-1/P[4]__CAD62680.1__P2_VP8*(41-223)_Ferritin (opt5)
aggagaaagcuuaccaugcaguacaucaaggccaacagcaaauucauuggcaucaccgagcugggguccggaucuggcgcucaaacaagauaugcccccgugaauugggggagcugggaaauuaacgacuccacgaccgucgagccuguucucgauggaccguaccagcccacaaccuuuaagccucccaaugacuauuggcugcuuaucucuagcaacacaaauggcgugguguacgaauccaccaacaauaacgauuucuggacagcggucucuagcguggagccucacguuucccagaccaaucggcaguauauucuguuuggggaaaacaaacaauucaauguggagaacaauagcgacaaguggaaauuuuucgagacguuuaccggaucuucccagggcaacuucagcaaucgcagaacacucaccucuuccaaccggcuggucggcaugcuuaaguacgggggacgcguguggacauuucauggcgaaacccccagagcuacgacagauagcucuaacaccgccgaccugaauaacaucuccaucauuauccacagcgaguucuauauuaucccucggucccaggaaucuaagugcaaugaguacauuaacaaugggcucagcggaggcgauaucauuaaacugcugaacgagcagguuaauaaggaaaugcaauccagcaaccucuacaugucuauguccagcugguguuauacacauucucuggacggggccggacuuuuucuguucgaucacgcugccgaggaauacgagcaugcuaaaaagcucaucaucuuucugaaugaaaacaaugugccgguccagcuuaccagcauuuccgcccccgagcacaaauucgagggccugacccagaucuuccagaaggcguaugaacacgagcaacauauuucugaaagcaucaacaauauuguggaccacgccaucaaguccaaagaucaugcuacauuuaacuuccuccagugguacguggccgagcagcacgaagaggagguccuguuuaaggacauccuggauaaaauugaacucaucggcaaugagaaccacgggcuguaucuugcugaccaauacguuaagggaauugccaaaagccgcaagucuugaggacuaguuauaagacugacuagcccgaugggccucccaacgggcccuccuccccuccuugcaccgagauuaauaaaaaaaaaaaaaaaaaaaaaaaaaaaaaaaaaaaaaaaaaaaaaaaaaaaaaaaaaaaaaaaaaaaaaaaaaaaaaaaaaaaaaaaaaaaaaaaaaaaa

SEQ ID NO: 1119 - RNA, 1302 nt, Artificial Sequence; identical to SEQ ID NO: 1118
  mRNA product Design i-3 (A100) comprising derived and/or modified sequence from RVA/DS-1/P[4]__ABV53252.1__P2_VP8*(41-223)_Ferritin (opt5)

SEQ ID NO: 1120 - RNA, 1302 nt, Artificial Sequence
  mRNA product Design i-3 (A100) comprising derived and/or modified sequence from RVA/F01322/P[6]__AFA51886.1__P2_VP8*(41-223)_Ferritin (opt5)
aggagaaagcuuaccaugcaguacaucaaggccaacagcaaauucauuggcaucaccgagcugggguccggaucuggcgcucaaacaaauuaugcccccgugacguggagccacggggaagucaacgacuccaccacaauugagccuguucucgauggaccguaccagcccaccaauuuuaagccucccaacgacuauuggauccugcuuaauccuacaaaccaacagguggugcuggaaggcaccaauaaaacagauauuugggucgcgcuccugcuuguggagcccaacguuaccaaucagucucggcaguacacgcuguucggggaaaccaagcagaucacaguggagaacaauaccaacaaauggaaguuuuucgagauguuucggagcuccgucucugcugaguuccagcauaagcgcacacucaccagcgacacgaaacuggccggauuuaugaaguucuauaauuccguguggacauuucacggcgaaaccccuaacgccacaaccgauuacagcucuaccuccaaucuguucgaaguugagacagugauccaugucgaguuuuauauuaucccgagaagccaagaaucuaaaugcuccgaguacauuaacacgggccucagcgggggagacaucauuaagcugcuuaacgaacaggugaauaaagagaugcagucuuccaaccuguacaugagcauguccucuugguguuauacccacagccucgauggcgcugggcuguuccuuuuugaccaugccgcugaagaguacgagcacgccaagaagcugaucauuuuccucaaugaaaacaaugugcccguccagcugacauccaucagcgcgccugagcacaaauucgaaggacugacccaaaucuuucagaaggccuaugagcaugaacagcacauuucugaguccaucaacaauauuguugaucaugcuaucaaaagcaaggaccacgccacauucaacuuucuccaaugguacguggcugagcagcacgaagaggaagugcuguucaaagauauucuugacaagaucgagcugaucggcaaugaaaaccaugggcucuaucuggccgaucaguacgucaaaggaauugcgaagucuagaaagagcugaggacuaguuauaagacugacuagcccgaugggccucccaacgggcccuccuccccuccuugcaccgagauuaauaaaaaaaaaaaaaaaaaaaaaaaaaaaaaaaaaaaaaaaaaaaaaaaaaaaaaaaaaaaaaaaaaaaaaaaaaaaaaaaaaaaaaaaaaaaaaaaaaaaa

SEQ ID NO: 1121 - RNA, 1302 nt, Artificial Sequence
  mRNA product Design i-3 (A100) comprising derived and/or modified sequence from RVA/1076/P[6]__AAA47337.1__P2_VP8*(41-223)_Ferritin (opt5)
aggagaaagcuuaccaugcaguacaucaaggccaacagcaaauucauuggcaucaccgagcugggguccggaucuggcgcucaaacaaauuaugcccccgugacguggagccacggggaagucaacgacuccaccacaauugagccuguucucgauggaccguaccagcccaccucuuuuaagccucccagcgacuauuggauccugcuuaauccuacaaaccaacagguggugcuggaaggcaccaauaaaacagauauuugggucgcgcuccugcuuguggagcccaacguuaccaaucaguccagacaguacacgcuguucggggaaaccaagcagaucacaguggagaacaauaccaacaaauggaaguuuuucgagauguuucggucuagcgucuccgcugaguuccagcauaagcgcacacucaccagcgacacgaaacuggccggauuucugaaguucuauaauucuguguggacauuuuacggcgaaaccccucacgccacaaccgauuauuccagcaccucuaaccucuccgaaguugagacagcuauccauguggaguucuacauuaucccgagaagccaagaaucuaaaugcaaugaguacauuaacacgggccuguccgggggagacaucauuaaacuucugaaugaacaggucaacaaggagaugcagagcuccaaccucuauaugucuaugagcuccugguguuacacccacagccuggauggcgccgggcuuuuucuguucgaccaugcugccgaagaguaugagcacgcgaagaagcucaucauuuuucugaaugaaaacaaugugcccgugcagcugacaucuaucuccgccccugagcacaaauucgaaggacucacccaaaucuuccagaaggcuuacgagcaugaacagcacauuagcgagucuaucaacaauauugucgaucaugccaucaaaagcaaggaccacgcuacauuuaacuuccugcaaugguauguugccgagcagcacgaagaggaagugcuuuuuaaagauauucuggacaagaucgagcucaucggcaaugaaaaccaugggcuguaccuugcggaucaguaugugaaaggaauugccaagucccggaagucuugaggacuaguuauaagacugacuagcccgaugggccucccaacgggcccuccuccccuccuugcaccgagauuaauaaaaaaaaaaaaaaaaaaaaaaaaaaaaaaaaaaaaaaaaaaaaaaaaaaaaaaaaaaaaaaaaaaaaaaaaaaaaaaaaaaaaaaaaaaaaaaaaaaaa

SEQ ID NO: 1122 - RNA, 1302 nt, Artificial Sequence
  mRNA product Design i-3 (A100) comprising derived and/or modified sequence from RVA/BE1128/P[8]__AEX30671.1__P2_VP8*(41-223)_Ferritin (opt5)
aggagaaagcuuaccaugcaguacaucaaggccaacagcaaauucauuggcaucaccgagcugggguccggaucuggcgcucaaacaagauaugcccccgugaauugggggcacggagaaauuaacgacagcacgaccgucgagccuauccucgauggcccguaccagcccacaaccuuuacaccucccaccgacuauuggauucugaucacauccaauaccaacgggguuguguacgaaucuacgaauaacagcgauuucuggaccgcggugaucgcugucgagccucaugugaaucccguugaccggcaguauaacguguuuggagaaaauaagcaguucaacguccgcaaugauuccgacaaauggaaguuucuugagauguucagaggcucuagccaaaacgauuuuuacaaucggcgcacacugaccuccgacacaagacucgugggcauucugaaauaugggggacggguuuggaccuuccacggcgagacgccucgcgccacaaccgauagcucuaacacagccaaucuugacgggaucuccauuaccauccauagcgaauuuuacauuaucccgagaucucaggaguccaagugcaacgaauacauuaacaauggacugagcggcggggauaucaucaagcuccugaacgaacaggugaauaaagagaugcagucuuccaaccuguauaugagcauguccucuugguguuacacccacagccucgacggagcuggccuguuccuuuuugaucaugccgcugaggaguaugaacacgccaagaaacugauuaucuuccucaaugagaacaauguccccgugcaacugacauccauuagcgcgccugaacacaaguuugagggccuuacgcagaucuuccagaaagccuacgagcaugaacagcacauuucugaguccaucaacaauaucguggaccaugcuauuaagagcaaggaccacgccaccuucaacuuucugcaaugguaugucgcugaacagcacgaggaagagguucucuucaaagauauccuggacaagauugagcugaucgggaaugaaaaccauggacucuaccuggccgaucaguaugugaaaggcauugcgaagucucggaaaagcugaggacuaguuauaagacugacuagcccgaugggccucccaacgggcccuccuccccuccuugcaccgagauuaauaaaaaaaaaaaaaaaaaaaaaaaaaaaaaaaaaaaaaaaaaaaaaaaaaaaaaaaaaaaaaaaaaaaaaaaaaaaaaaaaaaaaaaaaaaaaaaaaaaaa

SEQ ID NO: 1123 - RNA, 1302 nt, Artificial Sequence
  mRNA product Design i-3 (A100) comprising derived and/or modified sequence from RVA/Wa-VirWa/P[8]__ACR22783.1__P2_VP8*(41-223)_Ferritin (opt5)
aggagaaagcuuaccaugcaguacaucaaggccaacagcaaauucauuggcaucaccgagcugggguccggaucuggcgcucaaacaagauaugcccccgugaauugggggcacggagaaauuaacgacagcacgaccgucgagccuauccucgauggcccguaccagcccacaaccuuuacaccucccaaugacuauuggauucugaucaacuccaauaccaacgggguuguguacgaaucuacaaauaacagcgauuucuggaccgcgguggucgcuaucgagccucaugugaaucccguugaccggcaguauacgauuuuuggagaauccaagcaguucaacgugcgcaaugauucuaacaaauggaaguuucuugagauguucagaagcuccagccaaaaugaguuuuacaaccggcgcacccugacaucugacaccagacucgucggcauccugaaauauggcgggcggguguggacauuccacggagaaaccccucgcgccacgacagauuccagcucuaccgccaaucuuaacaacauuuccaucacaauucauagcgaguuuuacaucauuccgagaucucaggaauccaagugcaaugaguacaucaacaauggccugagcgggggagacaucauuaagcuccugaacgagcagguuaauaaagaaaugcaguccucuaaccuguauaugagcauguccagcugguguuacacccacucucucgauggcgcugggcuguuccuuuuugaccaugccgcugaggaauaugagcacgccaagaaacugaucauuuuccucaaugaaaacaaugugcccguccaacugaccuccaucagcgcgccugagcacaaguuugagggacuuacacagauuuuccagaaagccuacgaacaugagcagcacaucucugaaagcaucaacaauauuguggaucaugcuaucaaguccaaggaccacgccacguucaacuuucugcaaugguauguggcugagcagcacgaagaggagguccucuucaaagauauucuggacaagaucgaacugauuggcaaugagaaccauggccucuaccuggccgaccaguauguuaaagggaucgcgaagucucggaaaagcugaggacuaguuauaagacugacuagcccgaugggccucccaacgggcccuccuccccuccuugcaccgagauuaauaaaaaaaaaaaaaaaaaaaaaaaaaaaaaaaaaaaaaaaaaaaaaaaaaaaaaaaaaaaaaaaaaaaaaaaaaaaaaaaaaaaaaaaaaaaaaaaaaaaa

SEQ ID NO: 1124 - RNA, 1302 nt, Artificial Sequence
  mRNA product Design i-3 (A100) comprising derived and/or modified sequence from RVA/Wa/P[8]__AAA47290.1__P2_VP8*(41-223)_Ferritin (opt5)
aggagaaagcuuaccaugcaguacaucaaggccaacagcaaauucauuggcaucaccgagcugggguccggaucuggcgcucaaacaagauaugcccccgugaauugggggcacggagaaauuaacgacagcacgaccgucgagccuauccucgauggcccguaccagcccacaaccuuuacaccucccaaugacuauuggauucugaucaacuccaauaccaacgggguuguguacgaaucuacaaauaacagcgauuucuggaccgcgguggucgcuaucgagccucaugugaaucccguugaccggcaguauacgauuuuuggagaauccaagcaguucaacgugucuaaugauagcaacaaauggaaguuucuugagauguuccgcuccagcucucaaaaugaguuuuacaacagacggacccugacauccgacacccgcuucgucggcauccucaaauauggcgggagaguguggacauuucacggagaaaccccucgggccacgacagauagcagcuccaccgccaaucugaacaacauuagcaucacaauucauucugaguucuacaucauuccgcgcucccaggaaagcaagugcaaugaguacaucaacaauggccuuuccgggggagacaucauuaagcugcucaacgagcagguuaauaaagaaaugcagucuagcaaccuguauauguccaugagcucuugguguuacacccacucccuggauggcgcugggcucuuucuguucgaccaugccgcugaggaauaugagcacgccaagaaacuuaucauuuuucugaaugaaaacaaugugcccguccaacucaccagcaucucugcgccugagcacaaguucgagggacugacacagauuuuccagaaagccuacgaacaugagcagcacaucagcgaauccaucaacaauauuguggaucaugcuaucaagucuaaggaccacgccacguuuaacuuccuucaaugguauguggcugagcagcacgaagaggagguccuguuuaaagauauucucgacaagaucgaacugauuggcaaugagaaccauggccuguaccucgccgaccaguauguuaaagggaucgcgaagucuagaaaauccugaggacuaguuauaagacugacuagcccgaugggccucccaacgggcccuccuccccuccuugcaccgagauuaauaaaaaaaaaaaaaaaaaaaaaaaaaaaaaaaaaaaaaaaaaaaaaaaaaaaaaaaaaaaaaaaaaaaaaaaaaaaaaaaaaaaaaaaaaaaaaaaaaaaa

SEQ ID NO: 1125 - RNA, 1302 nt, Artificial Sequence
  mRNA product Design i-3 (A100) comprising derived and/or modified sequence from RVA/Wa/P[8]__AAA66953.1__P2_VP8*(41-223)_Ferritin (opt5)
aggagaaagcuuaccaugcaguacaucaaggccaacagcaaauucauuggcaucaccgagcugggguccggaucuggcgcucaaacaagauaugcccccgugaauugggggcacggagaaauuaacgacagcacgaccgucgagccuaugcucgauggcccguaccagcccacaaccuuuacaccucccaaugacuauuggauccugauuaacuccaauaccaacgggguuguguacgaaucuacaaauaacagcgauuucuggaccgcgguggucgcuaucgagccucaugugaaucccguugaccggcaguauacgaucuuuggagaauccaagcaguucaacgugucuaaugauagcaacaaauggaaguuucuugagauguuccgcuccagcucucaaaaugaguuuuacaacagacggacccugacauccgacacccgcuucgucggcauucucaaauauggcgggagaguguggacauuucacggagaaaccccucgggccacgacagauagcagcuccaccgccaaucugaacaacaucagcauuacaauccauucugaguucuacauuaucccgcgcucccaggaaagcaagugcaaugaguacauuaacaauggccuuuccgggggagacaucaucaagcugcucaacgagcagguuaauaaagaaaugcagucuagcaaccuguauauguccaugagcucuugguguuacacccacucccuggauggcgcugggcucuuucuguucgaccaugccgcugaggaauaugagcacgccaagaaacuuauuaucuuucugaaugaaaacaaugugcccguccaacucaccagcauuucugcgccugagcacaaguucgagggacugacacagaucuuccagaaagccuacgaacaugagcagcacauuagcgaauccaucaacaauaucguggaucaugcuauuaagucuaaggaccacgccacguuuaacuuccuucaaugguauguggcugagcagcacgaagaggagguccuguuuaaagauauccucgacaagauugaacugaucggcaaugagaaccauggccuguaccucgccgaccaguauguuaaagggauugcgaagucuagaaaauccugaggacuaguuauaagacugacuagcccgaugggccucccaacgggcccuccuccccuccuugcaccgagauuaauaaaaaaaaaaaaaaaaaaaaaaaaaaaaaaaaaaaaaaaaaaaaaaaaaaaaaaaaaaaaaaaaaaaaaaaaaaaaaaaaaaaaaaaaaaaaaaaaaaaa

SEQ ID NO: 1126 - RNA, 1236 nt, Artificial Sequence
  mRNA product Design i-3 (A100) comprising derived and/or modified sequence from RVA/BE1058/P[4]__AEX30665.1__LumSynt_P2_VP8*(65-223) (opt5)
aggagaaagcuuaccaugcagaucuacgagggcaagcugaccgccgaagggcucagauucggaauuguggcuagccgguuuaaccacgcccuggucgaccgccuuguugagggcgcgaucgaugcuauugugagacaugggggacgggaagaggacaucacacuggugcgcguccccggcuccugggaaauuccuguggccgccggggagcucgcuagaaaagaggauaucgacgccguuaucgcuauuggagugcugauccggggcgccacgccgcacuucgauuauauugcgucugaagucagcaagggccuugccgaccugucccucgagcugcgcaaacccaucaccuuuggggugauuacagcugauacccuggaacaagccaucgagagagcuggaacaaagcauggcaauaaagggugggaggccgcgcucucugccauugaaauggcuaaccuguucaagagccuucggggaggcuccgggggaucuggcggcagcgggggauccggcgggggacaguacaucaaggccaauagcaaauuuaucggcauuaccgagcuggggucuggauccggccucgacggcccuuaucagcccacaaccuucaagccucccaacgauuacuggcugcuuaucagcucuaauacggacgggguuguguaugaauccaccaacaauagcgauuuuuggacagcugucauugccguggagccucacgugaaccagaccaaucgccaauacguccuguucggagaaaacaaacaguuuaauaucgagaacucuuccgacaaguggaaauucuuugagauguucaagggcaauagccaguccgauuuuucuaacagacggacacucaccagcuccaaucgccugguugggaugcugaaguauggaggcagaguguggacguuccauggggaaacaccgcgggccaccacagacucuagcuccaccgcugaccucaacaacauuagcaucaucauucacucugaguucuacaucauuccccgcagccaggaauccaaaugcaaugaguacaucaacaauggccugugaggacuaguuauaagacugacuagcccgaugggccucccaacgggcccuccuccccuccuugcaccgagauuaauaaaaaaaaaaaaaaaaaaaaaaaaaaaaaaaaaaaaaaaaaaaaaaaaaaaaaaaaaaaaaaaaaaaaaaaaaaaaaaaaaaaaaaaaaaaaaaaaaaaa

SEQ ID NO: 1127 - RNA, 1236 nt, Artificial Sequence
  mRNA product Design i-3 (A100) comprising derived and/or modified sequence from RVA/DS-1/P[4]__CAD62680.1__LumSynt_P2_VP8*(65-223) (opt5)
aggagaaagcuuaccaugcagaucuacgagggcaagcugaccgccgaagggcucagauucggaauuguggcuagccgguuuaaccacgcccuggucgaccgccuuguugagggcgcgaucgaugcuauugugagacaugggggacgggaagaggacaucacacuggugcgcguccccggcuccugggaaauuccuguggccgccggggagcucgcuagaaaagaggauaucgacgccguuaucgcuauuggagugcugauccggggcgccacgccgcacuucgauuauauugcgucugaagucagcaagggccuugccgaccugucccucgagcugcgcaaacccaucaccuuuggggugauuacagcugauacccuggaacaagccaucgagagagcuggaacaaagcauggcaauaaagggugggaggccgcgcucucugccauugaaauggcuaaccuguucaagagccuucggggaggcuccgggggaucuggcggcagcgggggauccggcgggggacaguacaucaaggccaauagcaaauuuaucggcauuaccgagcuggggucuggauccggccucgacggcccuuaucagcccacaaccuucaagccucccaacgauuacuggcugcuuaucagcucuaauacgaacgggguuguguaugaauccaccaauaacaaugacuuuuggacagcugucagcucuguggagccucacgugucccagaccaaccgccaauacauucuguucggagaaaauaaacaguuuaacgucgagaauaacagcgauaaguggaaauucuuugagacauucaccggcuccucucaggggaauuuuagcaacagacggacgcucacauccagcaaccgccugguuggaaugcugaaguauggcgggagaguguggaccuuccauggcgaaacaccgcgggccaccaccgacucuuccaauacagccgaucucaacaauaucagcauuaucauccacucugaguucuacauuaucccccgcagccaggaauccaagugcaacgaguacauuaauaacggacugugaggacuaguuauaagacugacuagcccgaugggccucccaacgggcccuccuccccuccuugcaccgagauuaauaaaaaaaaaaaaaaaaaaaaaaaaaaaaaaaaaaaaaaaaaaaaaaaaaaaaaaaaaaaaaaaaaaaaaaaaaaaaaaaaaaaaaaaaaaaaaaaaaaaa

SEQ ID NO: 1128 - RNA, 1236 nt, Artificial Sequence; identical to SEQ ID NO: 1127
  mRNA product Design i-3 (A100) comprising derived and/or modified sequence from RVA/DS-1/P[4]__ABV53252.1__LumSynt_P2_VP8*(65-223) (opt5)

SEQ ID NO: 1129 - RNA, 1236 nt, Artificial Sequence
  mRNA product Design i-3 (A100) comprising derived and/or modified sequence from RVA/F01322/P[6]__AFA51886.1__LumSynt_P2_VP8*(65-223) (opt5)
aggagaaagcuuaccaugcagaucuacgagggcaagcugaccgccgaagggcucagauucggaauuguggcuagccgguuuaaccacgcccuggucgaccgccuuguugagggcgcgaucgaugcuauugugagacaugggggacgggaagaggacaucacacuggugcgcguccccggcuccugggaaauuccuguggccgccggggagcucgcuagaaaagaggauaucgacgccguuaucgcuauuggagugcugauccggggcgccacgccgcacuucgauuauauugcgucugaagucagcaagggccuugccgaccugucccucgagcugcgcaaacccaucaccuuuggggugauuacagcugauacccuggaacaagccaucgagagagcuggaacaaagcauggcaauaaagggugggaggccgcgcucucugccauugaaauggcuaaccuguucaagagccuucggggaggcuccgggggaucuggcggcagcgggggauccggcgggggacaguacaucaaggccaauagcaaauuuaucggcauuaccgagcuggggucuggauccggccucgacggcccuuaucagcccacaaacuucaagccucccaaugauuacuggauccugcuuaacccuaccaaucagcaaguugugcuggaagggacgaacaaaaccgacauuugggucgcucuccugcugguggagccgaaugugacaaaccagagccgccaguauacccucuuuggagaaacaaagcagaucaccgucgagaauaacacgaauaaauggaaguucuuugagauguucagaucuuccguuagcgccgaauuucaacacaagcggacacugaccucugauacaaaacuugccggcuucaugaaguuuuacaacuccguguggaccuuccauggggagacccccaaugcuacaacggacuauagcuccaccucuaaccuguucgaaguggagacagucauucacguggaauuuuacaucaucccucgcagccaggaguccaaaugcagcgaguacauuaacaccggacucugaggacuaguuauaagacugacuagcccgaugggccucccaacgggcccuccuccccuccuugcaccgagauuaauaaaaaaaaaaaaaaaaaaaaaaaaaaaaaaaaaaaaaaaaaaaaaaaaaaaaaaaaaaaaaaaaaaaaaaaaaaaaaaaaaaaaaaaaaaaaaaaaaaaa

SEQ ID NO: 1130 - RNA, 1236 nt, Artificial Sequence
  mRNA product Design i-3 (A100) comprising derived and/or modified sequence from RVA/1076/P[6]__AAA47337.1__LumSynt_P2_VP8*(65-223) (opt5)
aggagaaagcuuaccaugcagaucuacgagggcaagcugaccgccgaagggcucagauucggaauuguggcuagccgguuuaaccacgcccuggucgaccgccuuguugagggcgcgaucgaugcuauugugagacaugggggacgggaagaggacaucacacuggugcgcguccccggcuccugggaaauuccuguggccgccggggagcucgcuagaaaagaggauaucgacgccguuaucgcuauuggagugcugauccggggcgccacgccgcacuucgauuauauugcgucugaagucagcaagggccuugccgaccugucccucgagcugcgcaaacccaucaccuuuggggugauuacagcugauacccuggaacaagccaucgagagagcuggaacaaagcauggcaauaaagggugggaggccgcgcucucugccauugaaauggcuaaccuguucaagagccuucggggaggcuccgggggaucuggcggcagcgggggauccggcgggggacaguacaucaaggccaauagcaaauuuaucggcauuaccgagcuggggucuggauccggccucgacggcccuuaucagcccaccagcuucaagccucccucugauuacuggauccugcuuaacccuaccaaucagcaaguugugcuggaagggacgaacaaaaccgacauuugggucgcucuccugcugguggagccgaaugugacaaaccagucccgccaguauacccucuuuggagaaacaaagcagaucaccgucgagaauaacacgaauaaauggaaguucuuugagauguucagaagcucuguuuccgccgaauuucaacacaagcggacacugaccagcgauacaaaacuugccggcuuccugaaguuuuacaacuccguguggaccuucuauggggagacaccccaugcuacaacggacuacucuagcaccuccaaucucagcgaaguggagacagcgauucacgucgaguucuacaucaucccucgcucucaggaauccaaaugcaacgaguauauuaauaccggacugugaggacuaguuauaagacugacuagcccgaugggccucccaacgggcccuccuccccuccuugcaccgagauuaauaaaaaaaaaaaaaaaaaaaaaaaaaaaaaaaaaaaaaaaaaaaaaaaaaaaaaaaaaaaaaaaaaaaaaaaaaaaaaaaaaaaaaaaaaaaaaaaaaaaa

SEQ ID NO: 1131 - RNA, 1236 nt, Artificial Sequence
  mRNA product Design i-3 (A100) comprising derived and/or modified sequence from RVA/BE1128/P[8]__AEX30671.1__LumSynt_P2_VP8*(65-223) (opt5)
aggagaaagcuuaccaugcagaucuacgagggcaagcugaccgccgaagggcucagauucggaauuguggcuagccgguuuaaccacgcccuggucgaccgccuuguugagggcgcgaucgaugcuauugugagacaugggggacgggaagaggacaucacacuggugcgcguccccggcuccugggaaauuccuguggccgccggggagcucgcuagaaaagaggauaucgacgccguuaucgcuauuggagugcugauccggggcgccacgccgcacuucgauuauauugcgucugaagucagcaagggccuugccgaccugucccucgagcugcgcaaacccaucaccuuuggggugauuacagcugauacccuggaacaagccaucgagagagcuggaacaaagcauggcaauaaagggugggaggccgcgcucucugccauugaaauggcuaaccuguucaagagccuucggggaggcuccgggggaucuggcggcagcgggggauccggcgggggacaguacaucaaggccaauagcaaauuuaucggcauuaccgagcuggggucuggauccggccucgacggcccuuaucagcccacaaccuucacgccucccaccgauuacuggauccugauuacaagcaacaccaaugggguuguguaugaaucuacaaacaauuccgacuuuuggaccgcugucaucgccguggagccucacgugaacccggucgaucgccaguacaauguuuucggagaaaacaagcaauuuaaugugagaaacgacagcgauaaauggaaguuccuugagauguuucgggggucuucccagaaugacuucuauaaccgcagaacgcugacaagcgacacccggcucgugggcauucugaaauacggaggccgcgucuggacauuucauggggagacccccagagccaccacagauuccucuaauacggcuaaccuggacggcaucagcaucaccauucacuccgaguucuacaucauuccucggagccaggaaucuaagugcaacgaauauaucaauaacggacucugaggacuaguuauaagacugacuagcccgaugggccucccaacgggcccuccuccccuccuugcaccgagauuaauaaaaaaaaaaaaaaaaaaaaaaaaaaaaaaaaaaaaaaaaaaaaaaaaaaaaaaaaaaaaaaaaaaaaaaaaaaaaaaaaaaaaaaaaaaaaaaaaaaaa

SEQ ID NO: 1132 - RNA, 1236 nt, Artificial Sequence
  mRNA product Design i-3 (A100) comprising derived and/or modified sequence from RVA/Wa-VirWa/P[8]__ACR22783.1__LumSynt_P2_VP8*(65-223) (opt5)
aggagaaagcuuaccaugcagaucuacgagggcaagcugaccgccgaagggcucagauucggaauuguggcuagccgguuuaaccacgcccuggucgaccgccuuguugagggcgcgaucgaugcuauugugagacaugggggacgggaagaggacaucacacuggugcgcguccccggcuccugggaaauuccuguggccgccggggagcucgcuagaaaagaggauaucgacgccguuaucgcuauuggagugcugauccggggcgccacgccgcacuucgauuauauugcgucugaagucagcaagggccuugccgaccugucccucgagcugcgcaaacccaucaccuuuggggugauuacagcugauacccuggaacaagccaucgagagagcuggaacaaagcauggcaauaaagggugggaggccgcgcucucugccauugaaauggcuaaccuguucaagagccuucggggaggcuccgggggaucuggcggcagcgggggauccggcgggggacaguacaucaaggccaauagcaaauuuaucggcauuaccgagcuggggucuggauccggccucgacggcccuuaucagcccacaaccuucacgccucccaacgauuacuggauccugauuaauagcaacaccaaugggguuguguaugaaucuacaaacaauuccgacuuuuggaccgcugucguggccaucgagccucacgugaacccggucgaucgccaguacacaauuuucggagaaagcaagcaauuuaauguuagaaacgacucuaauaaauggaaguuccuugagauguuucgguccagcucccagaacgaguucuauaaucgcagaacccugacgucugauacacggcucgugggcauccugaaauacgggggacgcguguggaccuuucauggcgaaacacccagagccaccaccgacagcuccagcacagcuaaccugaacaauaucucuauuacgauccacuccgaguucuacauuaucccucggagccaggaaucuaagugcaacgaguauauuaauaacgggcucugaggacuaguuauaagacugacuagcccgaugggccucccaacgggcccuccuccccuccuugcaccgagauuaauaaaaaaaaaaaaaaaaaaaaaaaaaaaaaaaaaaaaaaaaaaaaaaaaaaaaaaaaaaaaaaaaaaaaaaaaaaaaaaaaaaaaaaaaaaaaaaaaaaaa

SEQ ID NO: 1133 - RNA, 1236 nt, Artificial Sequence
  mRNA product Design i-3 (A100) comprising derived and/or modified sequence from RVA/Wa/P[8]__AAA47290.1__LumSynt_P2_VP8*(65-223) (opt5)
aggagaaagcuuaccaugcagaucuacgagggcaagcugaccgccgaagggcucagauucggaauuguggcuagccgguuuaaccacgcccuggucgaccgccuuguugagggcgcgaucgaugcuauugugagacaugggggacgggaagaggacaucacacuggugcgcguccccggcuccugggaaauuccuguggccgccggggagcucgcuagaaaagaggauaucgacgccguuaucgcuauuggagugcugauccggggcgccacgccgcacuucgauuauauugcgucugaagucagcaagggccuugccgaccugucccucgagcugcgcaaacccaucaccuuuggggugauuacagcugauacccuggaacaagccaucgagagagcuggaacaaagcauggcaauaaagggugggaggccgcgcucucugccauugaaauggcuaaccuguucaagagccuucggggaggcuccgggggaucuggcggcagcgggggauccggcgggggacaguacaucaaggccaauagcaaauuuaucggcauuaccgagcuggggucuggauccggccucgacggcccuuaucagcccacaaccuucacgccucccaacgauuacuggauccugauuaauagcaacaccaaugggguuguguaugaaucuacaaacaauuccgacuuuuggaccgcugucguggccaucgagccucacgugaacccggucgaucgccaguacacaauuuucggagaaagcaagcaauuuaauguuucuaacgacuccaauaaauggaaguuccuugagauguuuagaagcuccucucagaacgaguucuauaaucggcgcacccugacgagcgauacaagauuugugggcauccucaaauacgggggacggguguggaccuuccauggcgaaacaccccgcgccaccaccgacuccagcucuacagcuaaccugaacaauaucuccauuacgauccacagcgaguucuacauuaucccuagaucucaggaaagcaagugcaacgaguauauuaauaacgggcugugaggacuaguuauaagacugacuagcccgaugggccucccaacgggcccuccuccccuccuugcaccgagauuaauaaaaaaaaaaaaaaaaaaaaaaaaaaaaaaaaaaaaaaaaaaaaaaaaaaaaaaaaaaaaaaaaaaaaaaaaaaaaaaaaaaaaaaaaaaaaaaaaaaaa

SEQ ID NO: 1134 - RNA, 1236 nt, Artificial Sequence; identical to SEQ ID NO: 1133
  mRNA product Design i-3 (A100) comprising derived and/or modified sequence from RVA/Wa/P[8]__AAA66953.1__LumSynt_P2_VP8*(65-223) (opt5)

SEQ ID NO: 1135 - RNA, 1308 nt, Artificial Sequence
  mRNA product Design i-3 (A100) comprising derived and/or modified sequence from RVA/BE1058/P[4]__AEX30665.1__LumSynt_P2_VP8*(41-223) (opt5)
aggagaaagcuuaccaugcagaucuacgagggcaagcugaccgccgaagggcucagauucggaauuguggcuagccgguuuaaccacgcccuggucgaccgccuuguugagggcgcgaucgaugcuauugugagacaugggggacgggaagaggacaucacacuggugcgcguccccggcuccugggaaauuccuguggccgccggggagcucgcuagaaaagaggauaucgacgccguuaucgcuauuggagugcugauccggggcgccacgccgcacuucgauuauauugcgucugaagucagcaagggccuugccgaccugucccucgagcugcgcaaacccaucaccuuuggggugauuacagcugauacccuggaacaagccaucgagagagcuggaacaaagcauggcaauaaagggugggaggccgcgcucucugccauugaaauggcuaaccuguucaagagccuucggggaggcuccgggggaucuggcggcagcgggggauccggcgggggacaguacaucaaggccaauagcaaauuuaucggcauuaccgagcuggggucuggauccggcgcucagacacgcuaugccccuguuaacuggggccacggggaaaucaaugacagcaccacgguggagcccguccucgauggaccuuaccagcccaccacauucaagccuccgaacgacuauuggcugcuuauuucuuccaauaccgauggcgugguguacgaaagcacaaacaauucugacuuuuggaccgccgucaucgcuguugagccccaugugaaccaaacgaauagacaguaugugcuguucggggagaacaaacaguuuaauauugaaaacuccagcgauaaguggaaauucuuugagauguucaagggaaauucccagucugacuuuagcaaccggcgcacacucaccuccagcaacagacuggucggcaugcugaaguacgggggccggguguggacauuccacggagaaaccccucgcgcgaccacagacucuuccagcacggccgaucucaauaacaucucuaucauuauccacagcgaguucuacauuauccccagaucccaagaaucuaaaugcaaugaguauauuaacaauggccugugaggacuaguuauaagacugacuagcccgaugggccucccaacgggcccuccuccccuccuugcaccgagauuaauaaaaaaaaaaaaaaaaaaaaaaaaaaaaaaaaaaaaaaaaaaaaaaaaaaaaaaaaaaaaaaaaaaaaaaaaaaaaaaaaaaaaaaaaaaaaaaaaaaaa

SEQ ID NO: 1136 - RNA, 1308 nt, Artificial Sequence
  mRNA product Design i-3 (A100) comprising derived and/or modified sequence from RVA/DS-1/P[4]__CAD62680.1__LumSynt_P2_VP8*(41-223) (opt5)
aggagaaagcuuaccaugcagaucuacgagggcaagcugaccgccgaagggcucagauucggaauuguggcuagccgguuuaaccacgcccuggucgaccgccuuguugagggcgcgaucgaugcuauugugagacaugggggacgggaagaggacaucacacuggugcgcguccccggcuccugggaaauuccuguggccgccggggagcucgcuagaaaagaggauaucgacgccguuaucgcuauuggagugcugauccggggcgccacgccgcacuucgauuauauugcgucugaagucagcaagggccuugccgaccugucccucgagcugcgcaaacccaucaccuuuggggugauuacagcugauacccuggaacaagccaucgagagagcuggaacaaagcauggcaauaaagggugggaggccgcgcucucugccauugaaauggcuaaccuguucaagagccuucggggaggcuccgggggaucuggcggcagcgggggauccggcgggggacaguacaucaaggccaauagcaaauuuaucggcauuaccgagcuggggucuggauccggcgcucagacacgcuaugccccuguuaacuggggcagcugggaaaucaaugacucuaccacgguggagcccguccucgaugggccuuaccagcccaccacauucaagccuccgaacgacuauuggcugcuuauuuccagcaauaccaacggagugguguacgaaucuacaaauaacaaugauuuuuggaccgccgucuccagcguugagccccacgugucccaaacgaacagacaguauauccuguucggcgagaauaaacaguuuaacguggaaaauaacucugacaaguggaaauucuuugagacauucaccgggagcucccagggaaacuuuagcaaucggcgcacacucaccucuuccaacagacuggucggcaugcugaaguacgggggccggguguggaccuuccauggagaaacaccucgcgcuacgaccgauagcucuaauacagcggaccucaacaauauuagcaucaucauucacuccgaguucuacaucauucccagaucucaagaaagcaagugcaacgaguauaucaauaacggccugugaggacuaguuauaagacugacuagcccgaugggccucccaacgggcccuccuccccuccuugcaccgagauuaauaaaaaaaaaaaaaaaaaaaaaaaaaaaaaaaaaaaaaaaaaaaaaaaaaaaaaaaaaaaaaaaaaaaaaaaaaaaaaaaaaaaaaaaaaaaaaaaaaaaa

SEQ ID NO: 1137 - RNA, 1308 nt, Artificial Sequence; identical to SEQ ID NO: 1136
  mRNA product Design i-3 (A100) comprising derived and/or modified sequence from RVA/DS-1/P[4]__ABV53252.1__LumSynt_P2_VP8*(41-223) (opt5)

SEQ ID NO: 1138 - RNA, 1308 nt, Artificial Sequence
  mRNA product Design i-3 (A100) comprising derived and/or modified sequence from RVA/F01322/P[6]__AFA51886.1__LumSynt_P2_VP8*(41-223) (opt5)
aggagaaagcuuaccaugcagaucuacgagggcaagcugaccgccgaagggcucagauucggaauuguggcuagccgguuuaaccacgcccuggucgaccgccuuguugagggcgcgaucgaugcuauugugagacaugggggacgggaagaggacaucacacuggugcgcguccccggcuccugggaaauuccuguggccgccggggagcucgcuagaaaagaggauaucgacgccguuaucgcuauuggagugcugauccggggcgccacgccgcacuucgauuauauugcgucugaagucagcaagggccuugccgaccugucccucgagcugcgcaaacccaucaccuuuggggugauuacagcugauacccuggaacaagccaucgagagagcuggaacaaagcauggcaauaaagggugggaggccgcgcucucugccauugaaauggcuaaccuguucaagagccuucggggaggcuccgggggaucuggcggcagcgggggauccggcgggggacaguacaucaaggccaauagcaaauuuaucggcauuaccgagcuggggucuggauccggcgcucagacaaacuaugccccuguuaccuggagccacggcgaagugaaugacucuacgaccaucgagcccguccucgaugggccuuaccagcccacaaacuucaagccuccgaaugacuauuggauucugcuuaaccccaccaaucaacagguggugcuggaaggaacaaacaaaaccgauaucugggucgcccuccugcugguugagccuaaugugacgaaccagucccgccaguacacacucuuuggcgagaccaagcaaauuacaguggaaaauaacaccaauaaauggaaguucuuugagauguucagaagcucugucuccgcugaauuucagcauaagcggacccugacaagcgacacgaaacuugcgggguucaugaaguuuuauaacuccguguggaccuuccacggagagacacccaacgccaccacagauuacucuagcaccuccaaucuguucgaaguugagacggugauccacgucgaguuuuacaucauuccucgcagccaggaaucuaaaugcuccgaguauaucaacacaggccucugaggacuaguuauaagacugacuagcccgaugggccucccaacgggcccuccuccccuccuugcaccgagauuaauaaaaaaaaaaaaaaaaaaaaaaaaaaaaaaaaaaaaaaaaaaaaaaaaaaaaaaaaaaaaaaaaaaaaaaaaaaaaaaaaaaaaaaaaaaaaaaaaaaaa

SEQ ID NO: 1139 - RNA, 1308 nt, Artificial Sequence
  mRNA product Design i-3 (A100) comprising derived and/or modified sequence from RVA/1076/P[6]__AAA47337.1__LumSynt_P2_VP8*(41-223) (opt5)
aggagaaagcuuaccaugcagaucuacgagggcaagcugaccgccgaagggcucagauucggaauuguggcuagccgguuuaaccacgcccuggucgaccgccuuguugagggcgcgaucgaugcuauugugagacaugggggacgggaagaggacaucacacuggugcgcguccccggcuccugggaaauuccuguggccgccggggagcucgcuagaaaagaggauaucgacgccguuaucgcuauuggagugcugauccggggcgccacgccgcacuucgauuauauugcgucugaagucagcaagggccuugccgaccugucccucgagcugcgcaaacccaucaccuuuggggugauuacagcugauacccuggaacaagccaucgagagagcuggaacaaagcauggcaauaaagggugggaggccgcgcucucugccauugaaauggcuaaccuguucaagagccuucggggaggcuccgggggaucuggcggcagcgggggauccggcgggggacaguacaucaaggccaauagcaaauuuaucggcauuaccgagcuggggucuggauccggcgcucagacaaacuaugccccuguuaccuggagccacggcgaagugaaugacucuacgaccaucgagcccguccucgaugggccuuaccagcccacauccuucaagccuccgagcgacuauuggauucugcuuaaccccaccaaucaacagguggugcuggaaggaacaaacaaaaccgauaucugggucgcccuccugcugguugagccuaaugugacgaaccagucucgccaguacacacucuuuggcgagaccaagcaaauuacaguggaaaauaacaccaauaaauggaaguucuuugagauguucagauccagcgucuccgcugaauuucagcauaagcggacccugacaucugacacgaaacuugcgggguuccugaaguuuuauaacagcguguggaccuucuacggagagacaccccacgccaccacagauuacuccagcaccucuaaucucuccgaaguugagacggcuauccacguggaguucuauaucauuccucgcagccaggaaucuaaaugcaacgaguacaucaacacaggccugugaggacuaguuauaagacugacuagcccgaugggccucccaacgggcccuccuccccuccuugcaccgagauuaauaaaaaaaaaaaaaaaaaaaaaaaaaaaaaaaaaaaaaaaaaaaaaaaaaaaaaaaaaaaaaaaaaaaaaaaaaaaaaaaaaaaaaaaaaaaaaaaaaaaa

SEQ ID NO: 1140 - RNA, 1308 nt, Artificial Sequence
  mRNA product Design i-3 (A100) comprising derived and/or modified sequence from RVA/BE1128/P[8]__AEX30671.1__LumSynt_P2_VP8*(41-223) (opt5)
aggagaaagcuuaccaugcagaucuacgagggcaagcugaccgccgaagggcucagauucggaauuguggcuagccgguuuaaccacgcccuggucgaccgccuuguugagggcgcgaucgaugcuauugugagacaugggggacgggaagaggacaucacacuggugcgcguccccggcuccugggaaauuccuguggccgccggggagcucgcuagaaaagaggauaucgacgccguuaucgcuauuggagugcugauccggggcgccacgccgcacuucgauuauauugcgucugaagucagcaagggccuugccgaccugucccucgagcugcgcaaacccaucaccuuuggggugauuacagcugauacccuggaacaagccaucgagagagcuggaacaaagcauggcaauaaagggugggaggccgcgcucucugccauugaaauggcuaaccuguucaagagccuucggggaggcuccgggggaucuggcggcagcgggggauccggcgggggacaguacaucaaggccaauagcaaauuuaucggcauuaccgagcuggggucuggauccggcgcucagacacgcuaugccccuguuaacuggggccacggggaaaucaaugacagcaccacgguggagcccauucucgauggaccuuaccagcccaccacauucaccccuccgacagacuauuggauccugauuaccucuaacacgaauggcgucguguacgaauccacaaacaauagcgauuuuuggaccgccgugaucgcugucgagccccauguuaacccuguggacagacaauauaauguguucggggagaacaagcaguuuaauguccggaacgauucugacaaauggaaguuccuugaaauguuucgcggauccagccagaaugacuucuacaacagacggacacugaccuccgauacccgccucgugggcauccugaaauacgggggcagaguuuggacauuucacggagagacgccccgggcgaccacagacucuagcaacaccgccaaucuggauggcauuuccaucacaauucacagcgaguucuauaucauuccuagaucucaggaauccaagugcaacgaauacaucaauaacgggcucugaggacuaguuauaagacugacuagcccgaugggccucccaacgggcccuccuccccuccuugcaccgagauuaauaaaaaaaaaaaaaaaaaaaaaaaaaaaaaaaaaaaaaaaaaaaaaaaaaaaaaaaaaaaaaaaaaaaaaaaaaaaaaaaaaaaaaaaaaaaaaaaaaaaa

SEQ ID NO: 1141 - RNA, 1308 nt, Artificial Sequence
  mRNA product Design i-3 (A100) comprising derived and/or modified sequence from RVA/Wa-VirWa/P[8]__ACR22783.1__LumSynt_P2_VP8*(41-223) (opt5)
aggagaaagcuuaccaugcagaucuacgagggcaagcugaccgccgaagggcucagauucggaauuguggcuagccgguuuaaccacgcccuggucgaccgccuuguugagggcgcgaucgaugcuauugugagacaugggggacgggaagaggacaucacacuggugcgcguccccggcuccugggaaauuccuguggccgccggggagcucgcuagaaaagaggauaucgacgccguuaucgcuauuggagugcugauccggggcgccacgccgcacuucgauuauauugcgucugaagucagcaagggccuugccgaccugucccucgagcugcgcaaacccaucaccuuuggggugauuacagcugauacccuggaacaagccaucgagagagcuggaacaaagcauggcaauaaagggugggaggccgcgcucucugccauugaaauggcuaaccuguucaagagccuucggggaggcuccgggggaucuggcggcagcgggggauccggcgggggacaguacaucaaggccaauagcaaauuuaucggcauuaccgagcuggggucuggauccggcgcucagacacgcuaugccccuguuaacuggggccacggggaaaucaaugacagcaccacgguggagcccauucucgauggaccuuaccagcccaccacauucaccccuccgaacgacuauuggauccugauuaauucuaacacaaauggcgucguguacgaauccaccaacaauagcgauuuuuggacggccguggucgcuaucgagccccauguuaacccuguggacagacaauauacaaucuucggggagucuaagcaguuuaaugugcggaacgauuccaauaaauggaaguuccuugaaauguuucgcagcuccucucagaacgaguucuacaacagacggacccugacaagcgacacccgccucgucggcauucugaaauacggagggagaguguggaccuuucacggcgaaacaccccgggcgacgaccgacuccagcucuacagccaaucugaacaauaucuccauuaccauccacagcgaguucuauauuaucccuagaucucaggaaagcaagugcaacgaguacaucaauaacggacucugaggacuaguuauaagacugacuagcccgaugggccucccaacgggcccuccuccccuccuugcaccgagauuaauaaaaaaaaaaaaaaaaaaaaaaaaaaaaaaaaaaaaaaaaaaaaaaaaaaaaaaaaaaaaaaaaaaaaaaaaaaaaaaaaaaaaaaaaaaaaaaaaaaaa

SEQ ID NO: 1142 - RNA, 1308 nt, Artificial Sequence
  mRNA product Design i-3 (A100) comprising derived and/or modified sequence from RVA/Wa/P[8]__AAA47290.1__LumSynt_P2_VP8*(41-223) (opt5)
aggagaaagcuuaccaugcagaucuacgagggcaagcugaccgccgaagggcucagauucggaauuguggcuagccgguuuaaccacgcccuggucgaccgccuuguugagggcgcgaucgaugcuauugugagacaugggggacgggaagaggacaucacacuggugcgcguccccggcuccugggaaauuccuguggccgccggggagcucgcuagaaaagaggauaucgacgccguuaucgcuauuggagugcugauccggggcgccacgccgcacuucgauuauauugcgucugaagucagcaagggccuugccgaccugucccucgagcugcgcaaacccaucaccuuuggggugauuacagcugauacccuggaacaagccaucgagagagcuggaacaaagcauggcaauaaagggugggaggccgcgcucucugccauugaaauggcuaaccuguucaagagccuucggggaggcuccgggggaucuggcggcagcgggggauccggcgggggacaguacaucaaggccaauagcaaauuuaucggcauuaccgagcuggggucuggauccggcgcucagacacgcuaugccccuguuaacuggggccacggggaaaucaaugacagcaccacgguggagcccauucucgauggaccuuaccagcccaccacauucaccccuccgaacgacuauuggauccugauuaauucuaacacaaauggcgucguguacgaauccaccaacaauagcgauuuuuggacggccguggucgcuaucgagccccauguuaacccuguggacagacaauauacaaucuucggggagucuaagcaguuuaauguguccaacgauagcaauaaauggaaguuccuugaaauguuucgguccucuagccagaacgaguucuacaaccgcagaacccugacauccgacacccgguuugucggcauucucaaauacggagggcgcguguggaccuuccacggcgaaacacccagagcgacgaccgacucuagcuccacagccaaucugaacaauaucagcauuaccauccacucugaguucuauauuaucccucggagccaggaauccaagugcaacgaguacaucaauaacggacugugaggacuaguuauaagacugacuagcccgaugggccucccaacgggcccuccuccccuccuugcaccgagauuaauaaaaaaaaaaaaaaaaaaaaaaaaaaaaaaaaaaaaaaaaaaaaaaaaaaaaaaaaaaaaaaaaaaaaaaaaaaaaaaaaaaaaaaaaaaaaaaaaaaaa

SEQ ID NO: 1143 - RNA, 1308 nt, Artificial Sequence
  mRNA product Design i-3 (A100) comprising derived and/or modified sequence from RVA/Wa/P[8]__AAA66953.1__LumSynt_P2_VP8*(41-223) (opt5)
aggagaaagcuuaccaugcagaucuacgagggcaagcugaccgccgaagggcucagauucggaauuguggcuagccgguuuaaccacgcccuggucgaccgccuuguugagggcgcgaucgaugcuauugugagacaugggggacgggaagaggacaucacacuggugcgcguccccggcuccugggaaauuccuguggccgccggggagcucgcuagaaaagaggauaucgacgccguuaucgcuauuggagugcugauccggggcgccacgccgcacuucgauuauauugcgucugaagucagcaagggccuugccgaccugucccucgagcugcgcaaacccaucaccuuuggggugauuacagcugauacccuggaacaagccaucgagagagcuggaacaaagcauggcaauaaagggugggaggccgcgcucucugccauugaaauggcuaaccuguucaagagccuucggggaggcuccgggggaucuggcggcagcgggggauccggcgggggacaguacaucaaggccaauagcaaauuuaucggcauuaccgagcuggggucuggauccggcgcucagacacgcuaugccccuguuaacuggggccacggggaaaucaaugacagcaccacgguggagcccaugcucgauggaccuuaccagcccaccacauucaccccuccgaacgacuauuggauucugaucaauucuaacacaaauggcgucguguacgaauccaccaacaauagcgauuuuuggacggccguggucgcuauugagccccauguuaacccuguggacagacaauauacaaucuucggggagucuaagcaguuuaauguguccaacgauagcaauaaauggaaguuccuugaaauguuucgguccucuagccagaacgaguucuacaaccgcagaacccugacauccgacacccgguuugucggaauccucaaauacggcgggcgcguguggaccuuccacggcgaaacacccagagcgacgaccgacucuagcuccacagccaaucugaacaauauuagcaucaccauucacucugaguucuauaucauuccucggagccaggaauccaagugcaacgaguacaucaauaacggacugugaggacuaguuauaagacugacuagcccgaugggccucccaacgggcccuccuccccuccuugcaccgagauuaauaaaaaaaaaaaaaaaaaaaaaaaaaaaaaaaaaaaaaaaaaaaaaaaaaaaaaaaaaaaaaaaaaaaaaaaaaaaaaaaaaaaaaaaaaaaaaaaaaaaa

SEQ ID NO: 1144 - RNA, 783 nt, Artificial Sequence
  mRNA product Design i-3 (A100) comprising derived and/or modified sequence from RVA/BE1058/P[4]__AEX30665.1__SP-IgE_P2_VP8*(65-223) (opt5)
aggagaaagcuuaccauggacuggaccuggauccuguuccucguggccgcugccacaagaguccacagccaguacauuaaggcgaacuccaaauuuaucggcauuacggagcuggggucuggaagcggccuugaugggcccuaucaaccuaccacauucaagccgcccaaugacuacuggcugcucaucuccucuaacaccgauggaguuguguaugaaagcacaaauaacuccgacuuuuggaccgcugugauugccgucgagccucaugugaaucagacaaaccggcaguacguucuguucggcgaaaauaaacaguuuaacaucgaaaauucuagcgauaaguggaaauucuuugagauguucaaggggaacucccaaagcgacuuuucuaaucgcagaacccuuacguccagcaaccggcuggugggaaugcucaaguauggcggccgcgucuggaccuuccacggggagacacccagagccaccacagauucuuccagcaccgcugaccugaauaacaucucuauuaucauucauuccgaguuuuacaucauuccucggagccaggaauccaaaugcaaugaguauaucaacaacggacugugaggacuaguuauaagacugacuagcccgaugggccucccaacgggcccuccuccccuccuugcaccgagauuaauaaaaaaaaaaaaaaaaaaaaaaaaaaaaaaaaaaaaaaaaaaaaaaaaaaaaaaaaaaaaaaaaaaaaaaaaaaaaaaaaaaaaaaaaaaaaaaaaaaaa

SEQ ID NO: 1145 - RNA, 783 nt, Artificial Sequence
  mRNA product Design i-3 (A100) comprising derived and/or modified sequence from RVA/DS-1/P[4]__CAD62680.1__SP-IgE_P2_VP8*(65-223) (opt5)
aggagaaagcuuaccauggacuggaccuggauccuguuccucguggccgcugccacaagaguccacagccaguacauuaaggcgaacuccaaauuuaucggcauuacggagcuggggucuggaagcggccuugaugggcccuaucaaccuaccacauucaagccgcccaaugacuacuggcugcucaucuccucuaacaccaauggaguuguguaugaaagcacaaacaauaacgauuuuuggaccgcuguguccucugucgagccucaugugagccagacaaaucggcaguacauucuguucggcgaaaacaaacaguuuaauguugagaacaauuccgacaaguggaaauucuuugaaaccuucacggggagcucucaaggaaacuuuuccaaucgcagaacccuuacaagcucuaaccggcuggugggcaugcucaaguauggcgggcgcgucuggaccuuccacggagagacacccagagccaccacggauuccagcaauacagccgaccugaacaacaucucuaucauuauccauuccgaguuuuacauuaucccucggagccaggaauccaagugcaaugaguauauuaacaauggccugugaggacuaguuauaagacugacuagcccgaugggccucccaacgggcccuccuccccuccuugcaccgagauuaauaaaaaaaaaaaaaaaaaaaaaaaaaaaaaaaaaaaaaaaaaaaaaaaaaaaaaaaaaaaaaaaaaaaaaaaaaaaaaaaaaaaaaaaaaaaaaaaaaaaa

SEQ ID NO: 1146 - RNA, 783 nt, Artificial Sequence; identical to SEQ ID NO: 1145
  mRNA product Design i-3 (A100) comprising derived and/or modified sequence from RVA/DS-1/P[4]__ABV53252.1__SP-IgE_P2_VP8*(65-223) (opt5)

SEQ ID NO: 1147 - RNA, 783 nt, Artificial Sequence
  mRNA product Design i-3 (A100) comprising derived and/or modified sequence from RVA/F01322/P[6]__AFA51886.1__SP-IgE_P2_VP8*(65-223) (opt5)
aggagaaagcuuaccauggacuggaccuggauccuguuccucguggccgcugccacaagaguccacagccaguacauuaaggcgaacuccaaauuuaucggcauuacggagcuggggucuggaagcggccuugaugggcccuaucaaccuaccaauuucaagccgcccaacgacuacuggauccugcucaauccuacaaaccagcagguugugcuggaaggaaccaauaaaacagauauuuggguggcccuucugcucgucgagcccaacgugaccaaucagucccggcaauauacacuguuuggcgaaaccaagcagaucacgguugagaacaauaccaacaaauggaaguucuuugaaauguuccgcucuagcguguccgcugaguuucagcauaagagaacacugaccucugacacaaaacucgccggguucaugaaguuuuacaauagcgucuggaccuuccacggagagacgccuaacgcuacaaccgauuauuccagcacaucuaaucuguuugaaguggagaccguuauccauguggaguucuacauuaucccccggucccaggaaagcaaaugcucugaguauauuaacaccggccuuugaggacuaguuauaagacugacuagcccgaugggccucccaacgggcccuccuccccuccuugcaccgagauuaauaaaaaaaaaaaaaaaaaaaaaaaaaaaaaaaaaaaaaaaaaaaaaaaaaaaaaaaaaaaaaaaaaaaaaaaaaaaaaaaaaaaaaaaaaaaaaaaaaaaa

SEQ ID NO: 1148 - RNA, 783 nt, Artificial Sequence
  mRNA product Design i-3 (A100) comprising derived and/or modified sequence from RVA/1076/P[6]__AAA47337.1__SP-IgE_P2_VP8*(65-223) (opt5)
aggagaaagcuuaccauggacuggaccuggauccuguuccucguggccgcugccacaagaguccacagccaguacauuaaggcgaacuccaaauuuaucggcauuacggagcuggggucuggaagcggccuugaugggcccuaucaaccuaccuccuucaagccgcccucugacuacuggauccugcucaauccuacaaaccagcagguugugcuggaaggaaccaauaaaacagauauuuggguggcccuucugcucgucgagcccaacgugaccaaucagagccggcaauauacacuguuuggcgaaaccaagcagaucacgguugagaacaauaccaacaaauggaaguucuuugaaauguuccgcuccucugugagcgcugaguuucagcauaagagaacacugaccuccgacacaaaacucgccggguuccugaaguuuuacaauagcgucuggaccuucuauggagagacgccucacgcuacaaccgauuacucuuccacaagcaaccuuucugaaguggagaccgccauccauguugaauuuuauauuaucccccggucccaggagagcaaaugcaaugaguacauuaacaccggccugugaggacuaguuauaagacugacuagcccgaugggccucccaacgggcccuccuccccuccuugcaccgagauuaauaaaaaaaaaaaaaaaaaaaaaaaaaaaaaaaaaaaaaaaaaaaaaaaaaaaaaaaaaaaaaaaaaaaaaaaaaaaaaaaaaaaaaaaaaaaaaaaaaaaa

SEQ ID NO: 1149 - RNA, 783 nt, Artificial Sequence
  mRNA product Design i-3 (A100) comprising derived and/or modified sequence from RVA/BE1128/P[8]__AEX30671.1__SP-IgE_P2_VP8*(65-223) (opt5)
aggagaaagcuuaccauggacuggaccuggauccuguuccucguggccgcugccacaagaguccacagccaguacauuaaggcgaacuccaaauuuaucggcauuacggagcuggggucuggaagcggccuugaugggcccuaucaaccuaccacauucaccccgcccacagacuacuggauccugauuaccuccaauacaaacggaguuguguaugaaucuaccaauaacagcgauuuuuggacggcugugaucgccgucgagccucaugugaaucccguugaccggcaguacaacguguucggcgaaaauaagcaguuuaacguccgcaaugauuccgacaaauggaaguuccucgagauguuuagagggucuagccagaacgauuucuauaaucggcgcacccugacauccgacaccagacuugugggaauccugaaauacggcggccggguuuggacauuucacggggaaaccccucgcgccacgacagauagcucuaacaccgcuaaucucgacggaauuuccaucacaauucauagcgaguucuauaucauucccagaucucaagaguccaagugcaacgaauacaucaauaacggccugugaggacuaguuauaagacugacuagcccgaugggccucccaacgggcccuccuccccuccuugcaccgagauuaauaaaaaaaaaaaaaaaaaaaaaaaaaaaaaaaaaaaaaaaaaaaaaaaaaaaaaaaaaaaaaaaaaaaaaaaaaaaaaaaaaaaaaaaaaaaaaaaaaaaa

SEQ ID NO: 1150 - RNA, 783 nt, Artificial Sequence
  mRNA product Design i-3 (A100) comprising derived and/or modified sequence from RVA/Wa-VirWa/P[8]__ACR22783.1__SP-IgE_P2_VP8*(65-223) (opt5)
aggagaaagcuuaccauggacuggaccuggauccuguuccucguggccgcugccacaagaguccacagccaguacauuaaggcgaacuccaaauuuaucggcauuacggagcuggggucuggaagcggccuugaugggcccuaucaaccuaccacauucaccccgcccaaugacuacuggauccugauuaacuccaauacaaacggaguuguguaugaaucuaccaauaacagcgauuuuuggacagcuguggucgccaucgagccucaugugaaucccguugaccggcaguacaccaucuucggcgaauccaagcaguuuaacgugcgcaaugauucuaacaaauggaaguuccucgagauguuuagaagcuccagccagaaugaguucuauaaccggcgcacgcugaccucugacacaagacuugucgggauucugaaauacggaggccggguguggaccuuucacggcgaaacaccucgcgccaccacggauuccagcucuacagcuaaucucaacaauaucuccauuaccauccauagcgaguucuauauuauccccagaucucaagaauccaagugcaacgaguacauuaacaaugggcugugaggacuaguuauaagacugacuagcccgaugggccucccaacgggcccuccuccccuccuugcaccgagauuaauaaaaaaaaaaaaaaaaaaaaaaaaaaaaaaaaaaaaaaaaaaaaaaaaaaaaaaaaaaaaaaaaaaaaaaaaaaaaaaaaaaaaaaaaaaaaaaaaaaaa

SEQ ID NO: 1151 - RNA, 783 nt, Artificial Sequence
  mRNA product Design i-3 (A100) comprising derived and/or modified sequence from RVA/Wa/P[8]__AAA47290.1__SP-IgE_P2_VP8*(65-223) (opt5)
aggagaaagcuuaccauggacuggaccuggauccuguuccucguggccgcugccacaagaguccacagccaguacauuaaggcgaacuccaaauuuaucggcauuacggagcuggggucuggaagcggccuugaugggcccuaucaaccuaccacauucaccccgcccaaugacuacuggauccugauuaacuccaauacaaacggaguuguguaugaaucuaccaauaacagcgauuuuuggacagcuguggucgccaucgagccucaugugaaucccguugaccggcaguacaccaucuucggcgaauccaagcaguuuaacgugucuaaugauagcaacaaauggaaguuccucgagauguuucgcuccagcucucagaaugaguucuauaacagacggacgcugaccuccgacacacgcuuugucgggauucuuaaauacggaggcagaguguggaccuuccacggcgaaacaccucgggccaccacggauucuagcuccacagcuaaucugaacaauaucagcauuaccauccauucugaguuuuauauuaucccccgcucccaagaaagcaagugcaacgaguacauuaacaaugggcucugaggacuaguuauaagacugacuagcccgaugggccucccaacgggcccuccuccccuccuugcaccgagauuaauaaaaaaaaaaaaaaaaaaaaaaaaaaaaaaaaaaaaaaaaaaaaaaaaaaaaaaaaaaaaaaaaaaaaaaaaaaaaaaaaaaaaaaaaaaaaaaaaaaaa

SEQ ID NO: 1152 - RNA, 783 nt, Artificial Sequence; identical to SEQ ID NO: 1151
  mRNA product Design i-3 (A100) comprising derived and/or modified sequence from RVA/Wa/P[8]__AAA66953.1__SP-IgE_P2_VP8*(65-223) (opt5)

SEQ ID NO: 1153 - RNA, 855 nt, Artificial Sequence
  mRNA product Design i-3 (A100) comprising derived and/or modified sequence from RVA/BE1058/P[4]__AEX30665.1__SP-IgE_P2_VP8*(41-223) (opt5)
aggagaaagcuuaccauggacuggaccuggauccuguuccucguggccgcugccacaagaguccacagccaguacauuaaggcgaacuccaaauuuaucggcauuacggagcuggggucuggaagcggcgcucaaacccgguaugcccccguuaauugggggcauggagaaaucaacgauuccacaaccguggagccugugcuugacggcccguaccagcccacaaccuucaagccucccaaugauuauuggcugcucauuucuagcaacacagacggggucguguacgaauccaccaauaacucugauuuuuggacggccguuaucgcuguggagccucacgucaaucagaccaaccgccaguaugugcuguucggagaaaauaaacaauuuaacaucgagaauagcuccgacaaguggaaauucuuugagauguucaagggcaacagccagucugauuuuuccaauagacggacacuuaccagcucuaaccgccugguuggcaugcucaaguacgggggaagaguguggacauuccauggcgaaacgccccgggccaccacagacuccagcucuaccgcugaucugaauaacauuuccaucauuauccacagcgaguuuuauauuaucccucgcucccaggaaucuaaaugcaacgaguacauuaauaacgggcugugaggacuaguuauaagacugacuagcccgaugggccucccaacgggcccuccuccccuccuugcaccgagauuaauaaaaaaaaaaaaaaaaaaaaaaaaaaaaaaaaaaaaaaaaaaaaaaaaaaaaaaaaaaaaaaaaaaaaaaaaaaaaaaaaaaaaaaaaaaaaaaaaaaaa

SEQ ID NO: 1154 - RNA, 855 nt, Artificial Sequence
  mRNA product Design i-3 (A100) comprising derived and/or modified sequence from RVA/DS-1/P[4]__CAD62680.1__SP-IgE_P2_VP8*(41-223) (opt5)
aggagaaagcuuaccauggacuggaccuggauccuguuccucguggccgcugccacaagaguccacagccaguacauuaaggcgaacuccaaauuuaucggcauuacggagcuggggucuggaagcggcgcucaaacccgguaugcccccguuaauuggggguccugggaaaucaacgauucuacaaccguggagccugugcuugacggaccguaccagcccacaaccuucaagccucccaaugauuauuggcugcucauuagcuccaacacaaauggcgucguguacgaaucuaccaacaauaacgacuuuuggacggccguuagcuccguggagccucaugucagccagaccaaucgccaguauauccuguucggggaaaacaaacaauuuaauguggagaacaauucugauaaguggaaauucuuugagacauucaccggauccagccagggcaacuuuucuaauagacggacacuuaccuccagcaaccgccugguuggcaugcucaaguacgggggaagaguguggacguuccacggcgaaacaccccgggcuaccacagacucuuccaacaccgccgaucugaauaacaucagcauuaucauucauuccgaguuuuauaucauuccucgcucucaggaaagcaagugcaaugaguacaucaacaaugggcugugaggacuaguuauaagacugacuagcccgaugggccucccaacgggcccuccuccccuccuugcaccgagauuaauaaaaaaaaaaaaaaaaaaaaaaaaaaaaaaaaaaaaaaaaaaaaaaaaaaaaaaaaaaaaaaaaaaaaaaaaaaaaaaaaaaaaaaaaaaaaaaaaaaaa

SEQ ID NO: 1155 - RNA, 855 nt, Artificial Sequence; identical to SEQ ID NO: 1154
  mRNA product Design i-3 (A100) comprising derived and/or modified sequence from RVA/DS-1/P[4]__ABV53252.1__SP-IgE_P2_VP8*(41-223) (opt5)

SEQ ID NO: 1156 - RNA, 855 nt, Artificial Sequence
  mRNA product Design i-3 (A100) comprising derived and/or modified sequence from RVA/F01322/P[6]__AFA51886.1__SP-IgE_P2_VP8*(41-223) (opt5)
aggagaaagcuuaccauggacuggaccuggauccuguuccucguggccgcugccacaagaguccacagccaguacauuaaggcgaacuccaaauuuaucggcauuacggagcuggggucuggaagcggcgcucaaaccaauuaugcccccguuacauggucccauggggaagugaacgauucuaccacaaucgagccugugcuugacggaccguaccagcccaccaauuucaagccucccaacgauuauuggauucugcucaauccuacaaaccagcaggucgugcuggaaggcaccaauaaaacggacaucuggguugcccuucugcucguggagcccaacgucaccaaucaaagccggcaguacacacuguuuggggaaaccaagcagaucacaguggagaacaauaccaacaaauggaaguucuuugagauguuccgcuccucuguuagcgcugaauuucagcacaagagaacgcugacauccgauaccaaacucgccggauucaugaaguuuuauaauagcguguggacauuccauggcgagaccccuaacgcuaccacagacuacucuuccacgagcaaucuguuugaagucgagaccgugauucacguggaguucuauaucauuccgcggucucaagaauccaaaugcagcgaguacaucaacacaggccuuugaggacuaguuauaagacugacuagcccgaugggccucccaacgggcccuccuccccuccuugcaccgagauuaauaaaaaaaaaaaaaaaaaaaaaaaaaaaaaaaaaaaaaaaaaaaaaaaaaaaaaaaaaaaaaaaaaaaaaaaaaaaaaaaaaaaaaaaaaaaaaaaaaaaa

SEQ ID NO: 1157 - RNA, 855 nt, Artificial Sequence
  mRNA product Design i-3 (A100) comprising derived and/or modified sequence from RVA/1076/P[6]__AAA47337.1__SP-IgE_P2_VP8*(41-223) (opt5)
aggagaaagcuuaccauggacuggaccuggauccuguuccucguggccgcugccacaagaguccacagccaguacauuaaggcgaacuccaaauuuaucggcauuacggagcuggggucuggaagcggcgcucaaaccaauuaugcccccguuacauggucccauggggaagugaacgauucuaccacaaucgagccugugcuugacggaccguaccagcccaccagcuucaagccucccuccgauuauuggauucugcucaauccuacaaaccagcaggucgugcuggaaggcaccaauaaaacggacaucuggguugcccuucugcucguggagcccaacgucaccaaucaaucucggcaguacacacuguuuggggaaaccaagcagaucacaguggagaacaauaccaacaaauggaaguucuuugagauguuccgcagcuccguuagcgcugaauuucagcacaagagaacgcugacaucugauaccaaacucgccggauuccugaaguuuuauaauuccguguggacauucuacggcgagaccccucaugcuaccacagacuauagcucuacguccaaccuuagcgaagucgagaccgccauucacguggaguuuuacaucauuccgcggucucaagaauccaaaugcaaugaguacaucaacacaggccugugaggacuaguuauaagacugacuagcccgaugggccucccaacgggcccuccuccccuccuugcaccgagauuaauaaaaaaaaaaaaaaaaaaaaaaaaaaaaaaaaaaaaaaaaaaaaaaaaaaaaaaaaaaaaaaaaaaaaaaaaaaaaaaaaaaaaaaaaaaaaaaaaaaaa

SEQ ID NO: 1158 - RNA, 855 nt, Artificial Sequence
  mRNA product Design i-3 (A100) comprising derived and/or modified sequence from RVA/BE1128/P[8]__AEX30671.1__SP-IgE_P2_VP8*(41-223) (opt5)
aggagaaagcuuaccauggacuggaccuggauccuguuccucguggccgcugccacaagaguccacagccaguacauuaaggcgaacuccaaauuuaucggcauuacggagcuggggucuggaagcggcgcucaaacccgguaugcccccguuaauugggggcauggagaaaucaacgauuccacaaccguggagccuauucuugacggcccguaccagcccacaaccuucacaccucccaccgauuauuggauccugaucacgucuaauaccaacgggguggucuacgaaagcacaaauaacuccgacuuuuggaccgccgugauugcuguugagccucacgugaaucccgucgaucgccaguauaacguguucggagaaaauaagcaguuuaacguuagaaaugacucugauaaauggaaguuccucgagauguuucggggcagcucccaaaacgacuucuacaaucgcagaacacugaccagcgauacgcggcuugugggcauccugaaauaugggggacgcgucuggacauuucauggcgagaccccuagagccacaaccgacucuuccaacaccgcuaaucucgaugggauuagcaucacaauucacucugaguucuacaucauuccgcggucccaggaaagcaagugcaacgaauacaucaacaauggacugugaggacuaguuauaagacugacuagcccgaugggccucccaacgggcccuccuccccuccuugcaccgagauuaauaaaaaaaaaaaaaaaaaaaaaaaaaaaaaaaaaaaaaaaaaaaaaaaaaaaaaaaaaaaaaaaaaaaaaaaaaaaaaaaaaaaaaaaaaaaaaaaaaaaa

SEQ ID NO: 1159 - RNA, 855 nt, Artificial Sequence
  mRNA product Design i-3 (A100) comprising derived and/or modified sequence from RVA/Wa-VirWa/P[8]__ACR22783.1__SP-IgE_P2_VP8*(41-223) (opt5)
aggagaaagcuuaccauggacuggaccuggauccuguuccucguggccgcugccacaagaguccacagccaguacauuaaggcgaacuccaaauuuaucggcauuacggagcuggggucuggaagcggcgcucaaacccgguaugcccccguuaauugggggcauggagaaaucaacgauuccacaaccguggagccuauucuugacggcccguaccagcccacaaccuucacaccucccaaugauuauuggauccugaucaacucuaauaccaacgggguggucuacgaaagcacgaauaacuccgacuuuuggaccgccgugguugcuauugagccucacgugaaucccgucgaucgccaguauacaaucuucggagaaucuaagcaguuuaacgugagaaaugacagcaacaaauggaaguuccucgagauguuucgguccagcucucaaaaugaguucuacaaccgcagaacccugacauccgauacccggcuuguuggcauucugaaauauggcgggcgcguguggacguuucauggagaaacaccuagagccaccacagacucuagcuccaccgcuaaucucaacaacaucagcauuaccauccacucugaguucuacauuaucccgcggucccaggaaagcaagugcaaugaguacaucaacaauggccugugaggacuaguuauaagacugacuagcccgaugggccucccaacgggcccuccuccccuccuugcaccgagauuaauaaaaaaaaaaaaaaaaaaaaaaaaaaaaaaaaaaaaaaaaaaaaaaaaaaaaaaaaaaaaaaaaaaaaaaaaaaaaaaaaaaaaaaaaaaaaaaaaaaaa

SEQ ID NO: 1160 - RNA, 855 nt, Artificial Sequence
  mRNA product Design i-3 (A100) comprising derived and/or modified sequence from RVA/Wa/P[8]__AAA47290.1__SP-IgE_P2_VP8*(41-223) (opt5)
aggagaaagcuuaccauggacuggaccuggauccuguuccucguggccgcugccacaagaguccacagccaguacauuaaggcgaacuccaaauuuaucggcauuacggagcuggggucuggaagcggcgcucaaacccgguaugcccccguuaauugggggcauggagaaaucaacgauuccacaaccguggagccuauucuugacggcccguaccagcccacaaccuucacaccucccaaugauuauuggauccugaucaacucuaauaccaacgggguggucuacgaaagcacgaauaacuccgacuuuuggaccgccgugguugcuauugagccucacgugaaucccgucgaucgccaguauacaaucuucggagaaucuaagcaguuuaacgugagcaaugacuccaacaaauggaaguuccucgagauguuuagaucuagcucccaaaaugaguucuacaaccggcgcacccugacaagcgauaccagauuuguuggcauucuuaaauauggcgggcggguguggacguuccauggagaaacaccucgcgccaccacagacucuuccagcaccgcuaaucugaacaacaucucuauuaccauccacuccgaguuuuacauuaucccgagaagccaggaauccaagugcaaugaguacaucaacaauggccucugaggacuaguuauaagacugacuagcccgaugggccucccaacgggcccuccuccccuccuugcaccgagauuaauaaaaaaaaaaaaaaaaaaaaaaaaaaaaaaaaaaaaaaaaaaaaaaaaaaaaaaaaaaaaaaaaaaaaaaaaaaaaaaaaaaaaaaaaaaaaaaaaaaaa

SEQ ID NO: 1161 - RNA, 855 nt, Artificial Sequence
  mRNA product Design i-3 (A100) comprising derived and/or modified sequence from RVA/Wa/P[8]__AAA66953.1__SP-IgE_P2_VP8*(41-223) (opt5)
aggagaaagcuuaccauggacuggaccuggauccuguuccucguggccgcugccacaagaguccacagccaguacauuaaggcgaacuccaaauuuaucggcauuacggagcuggggucuggaagcggcgcucaaacccgguaugcccccguuaauugggggcauggagaaaucaacgauuccacaaccguggagccuaugcuugacggcccguaccagcccacaaccuucacaccucccaaugauuauuggauucugaucaacucuaauaccaacgggguggucuacgaaagcacgaauaacuccgacuuuuggaccgccgugguugcuaucgagccucacgugaaucccgucgaucgccaguauacaauuuucggagaaucuaagcaguuuaacgugagcaaugacuccaacaaauggaaguuccucgagauguuuagaucuagcucccaaaaugaguucuacaaccggcgcacccugacaagcgauaccagauuuguuggcauccuuaaauauggcgggcggguguggacguuccauggagaaacaccucgcgccaccacagacucuuccagcaccgcuaaucugaacaacauuucuaucaccauucacuccgaguuuuacaucauuccgagaagccaggaauccaagugcaaugaguacaucaacaauggccucugaggacuaguuauaagacugacuagcccgaugggccucccaacgggcccuccuccccuccuugcaccgagauuaauaaaaaaaaaaaaaaaaaaaaaaaaaaaaaaaaaaaaaaaaaaaaaaaaaaaaaaaaaaaaaaaaaaaaaaaaaaaaaaaaaaaaaaaaaaaaaaaaaaaa

SEQ ID NO: 1162 - RNA, 815 nt, Artificial Sequence
  mRNA product Design a-1 (hSL-A100) comprising derived and/or modified sequence from RVA/BE1058/P[4]__AEX30665.1__P2_VP8*(65-223) (opt1)
aggagagucccgcagucggcguccagcggcucugcuuguucgugugugugucguugcaggccuuauucaagcuuaccaugcaguacaucaaggccaacagcaaguucaucggcaucaccgagcugggcagcggguccggccucgacggccccuaccagcccacgaccuucaagccgcccaacgacuacuggcugcugaucuccagcaacaccgacgggguggucuacgaguccaccaacaacagcgacuucuggacggccgugaucgccguggagccccacgucaaccagaccaaccgccaguacgugcuguucggcgagaacaagcaguucaacaucgagaacuccagcgacaaguggaaguucuucgagauguucaagggcaacucccagagcgacuucuccaaccggcgcacccugaccagcuccaaccggcugguggggaugcucaaguacggcgggcgcgucuggacguuccacggcgagaccccgcgggccaccaccgacagcuccagcacggccgaccugaacaacaucuccaucaucauccacagcgaguucuacaucaucccccgcagccaggaguccaagugcaacgaguacaucaacaacgggcugugaggacuagucccuguucccagagcccacuuuuuuuucuuuuuuugaaauaaaauagccugucuuucagaucucaaaggcucuuuucagagccaccaaaaaaaaaaaaaaaaaaaaaaaaaaaaaaaaaaaaaaaaaaaaaaaaaaaaaaaaaaaaaaaaaaaaaaaaaaaaaaaaaaaaaaaaaaaaaaaaaaaaa

SEQ ID NO: 1163 - RNA, 815 nt, Artificial Sequence
  mRNA product Design a-1 (hSL-A100) comprising derived and/or modified sequence from RVA/DS-1/P[4]__CAD62680.1__P2_VP8*(65-223) (opt1)
aggagagucccgcagucggcguccagcggcucugcuuguucgugugugugucguugcaggccuuauucaagcuuaccaugcaguacaucaaggccaacagcaaguucaucggcaucaccgagcugggcagcggguccggccucgacgggcccuaccagccgacgaccuucaagccgcccaacgacuacuggcugcugaucuccagcaacaccaacggcguggucuacgaguccaccaacaacaacgacuucuggacggccgugagcuccguggagccccacgucagccagaccaaccgccaguacauccucuucggggagaacaagcaguucaacguggagaacaacuccgacaaguggaaguucuucgagaccuucaccggcagcucccagggcaacuucagcaaccggcgcacgcugaccuccagcaaccggcugguggggaugcucaaguacggcgggcgcgucuggaccuuccacggcgagacgccccgggccaccaccgacuccagcaacaccgccgaccugaacaacaucagcaucaucauccacuccgaguucuacaucaucccccgcagccaggaguccaagugcaacgaguacaucaacaacgggcugugaggacuagucccuguucccagagcccacuuuuuuuucuuuuuuugaaauaaaauagccugucuuucagaucucaaaggcucuuuucagagccaccaaaaaaaaaaaaaaaaaaaaaaaaaaaaaaaaaaaaaaaaaaaaaaaaaaaaaaaaaaaaaaaaaaaaaaaaaaaaaaaaaaaaaaaaaaaaaaaaaaaaa

SEQ ID NO: 1164 - RNA, 815 nt, Artificial Sequence; identical to SEQ ID NO: 1163
  mRNA product Design a-1 (hSL-A100) comprising derived and/or modified sequence from RVA/DS-1/P[4]__ABV53252.1__P2_VP8*(65-223) (opt1)

SEQ ID NO: 1165 - RNA, 815 nt, Artificial Sequence
  mRNA product Design a-1 (hSL-A100) comprising derived and/or modified sequence from RVA/F01322/P[6]__AFA51886.1__P2_VP8*(65-223) (opt1)
aggagagucccgcagucggcguccagcggcucugcuuguucgugugugugucguugcaggccuuauucaagcuuaccaugcaguacaucaaggccaacagcaaguucaucggcaucaccgagcugggcagcggguccggccucgacgggcccuaccagccgaccaacuucaagccgcccaacgacuacuggauccugcugaaccccaccaaccagcagguggugcucgagggcacgaacaagaccgacaucugggucgcccugcugcucguggagccgaacgugaccaaccagagccggcaguacacccuguucggggagacgaagcagaucaccgucgagaacaacaccaacaaguggaaguucuucgagauguuccgcuccagcguguccgccgaguuccagcacaagcggacccugacgagcgacaccaagcucgccggcuucaugaaguucuacaacuccguguggaccuuccacggcgagacccccaacgccacgaccgacuacagcuccaccagcaaccuguucgaggucgagaccgugauccacguggaguucuacaucaucccccgcucccaggagagcaagugcuccgaguacaucaacacggggcugugaggacuagucccuguucccagagcccacuuuuuuuucuuuuuuugaaauaaaauagccugucuuucagaucucaaaggcucuuuucagagccaccaaaaaaaaaaaaaaaaaaaaaaaaaaaaaaaaaaaaaaaaaaaaaaaaaaaaaaaaaaaaaaaaaaaaaaaaaaaaaaaaaaaaaaaaaaaaaaaaaaaaa

SEQ ID NO: 1166 - RNA, 815 nt, Artificial Sequence
  mRNA product Design a-1 (hSL-A100) comprising derived and/or modified sequence from RVA/1076/P[6]__AAA47337.1__P2_VP8*(65-223) (opt1)
aggagagucccgcagucggcguccagcggcucugcuuguucgugugugugucguugcaggccuuauucaagcuuaccaugcaguacaucaaggccaacagcaaguucaucggcaucaccgagcugggcagcggguccggccucgacgggcccuaccagccgaccuccuucaagccgcccagcgacuacuggauccugcugaaccccaccaaccagcaggucgugcucgagggcacgaacaagaccgacaucuggguggcccugcugcucguggagcccaacgugaccaaccagucccggcaguacacccuguucggggagacgaagcagaucaccgucgagaacaacaccaacaaguggaaguucuucgagauguuccgcagcuccgugagcgccgaguuccagcacaagcggacccugacguccgacaccaagcucgccggcuuccugaaguucuacaacagcguguggaccuucuacggcgagacgccccacgccaccaccgacuacuccagcaccuccaaccugagcgaggucgagaccgcgauccacguggaguucuacaucaucccccgcucccaggagagcaagugcaacgaguacaucaacacggggcugugaggacuagucccuguucccagagcccacuuuuuuuucuuuuuuugaaauaaaauagccugucuuucagaucucaaaggcucuuuucagagccaccaaaaaaaaaaaaaaaaaaaaaaaaaaaaaaaaaaaaaaaaaaaaaaaaaaaaaaaaaaaaaaaaaaaaaaaaaaaaaaaaaaaaaaaaaaaaaaaaaaaaa

SEQ ID NO: 1167 - RNA, 815 nt, Artificial Sequence
  mRNA product Design a-1 (hSL-A100) comprising derived and/or modified sequence from RVA/BE1128/P[8]__AEX30671.1__P2_VP8*(65-223) (opt1) R8575/R8576/R8628
aggagagucccgcagucggcguccagcggcucugcuuguucgugugugugucguugcaggccuuauucaagcuuaccaugcaguacaucaaggccaacagcaaguucaucggcaucaccgagcugggcagcggguccggccucgacggcccguaccagccgacgaccuucaccccgcccaccgacuacuggauccugaucacguccaacaccaacggggugguguacgagagcaccaacaacuccgacuucuggaccgccgucaucgccguggagccccacgugaacccggucgaccgccaguacaacguguucggcgagaacaagcaguucaacgugcggaacgacagcgacaaguggaaguuccuggagauguuccgcggcuccagccagaacgacuucuacaaccggcgcacgcucaccuccgacacccggcuggucgggauccugaaguacggcgggcgcguguggaccuuccacggcgagacgccccgggccaccaccgacagcuccaacaccgccaaccucgacgggaucagcaucacgauccacuccgaguucuacaucaucccccgcagccaggaguccaagugcaacgaguacaucaacaacggccugugaggacuagucccuguucccagagcccacuuuuuuuucuuuuuuugaaauaaaauagccugucuuucagaucucaaaggcucuuuucagagccaccaaaaaaaaaaaaaaaaaaaaaaaaaaaaaaaaaaaaaaaaaaaaaaaaaaaaaaaaaaaaaaaaaaaaaaaaaaaaaaaaaaaaaaaaaaaaaaaaaaaaa

SEQ ID NO: 1168 - RNA, 815 nt, Artificial Sequence
  mRNA product Design a-1 (hSL-A100) comprising derived and/or modified sequence from RVA/Wa-VirWa/P[8]__ACR22783.1__P2_VP8*(65-223) (opt1)
aggagagucccgcagucggcguccagcggcucugcuuguucgugugugugucguugcaggccuuauucaagcuuaccaugcaguacaucaaggccaacagcaaguucaucggcaucaccgagcugggcagcggguccggccucgacgggcccuaccagccgacgaccuucaccccgcccaacgacuacuggauccugaucaacagcaacaccaacggcgucguguacgaguccacgaacaacagcgacuucuggaccgccguggucgccaucgagccccacgugaacccgguggaccgccaguacaccaucuucggggaguccaagcaguucaacguccggaacgacagcaacaaguggaaguuccuggagauguuccgcuccagcucccagaacgaguucuacaaccggcgcacccucacgagcgacacccggcuggugggcauccugaaguacggcgggcgcguguggaccuuccacggcgagaccccgcgggccacgaccgacuccagcuccaccgccaaccucaacaacaucagcaucaccauccacuccgaguucuacaucaucccccgcagccaggagagcaagugcaacgaguacaucaacaacgggcugugaggacuagucccuguucccagagcccacuuuuuuuucuuuuuuugaaauaaaauagccugucuuucagaucucaaaggcucuuuucagagccaccaaaaaaaaaaaaaaaaaaaaaaaaaaaaaaaaaaaaaaaaaaaaaaaaaaaaaaaaaaaaaaaaaaaaaaaaaaaaaaaaaaaaaaaaaaaaaaaaaaaaa

SEQ ID NO: 1169 - RNA, 815 nt, Artificial Sequence
  mRNA product Design a-1 (hSL-A100) comprising derived and/or modified sequence from RVA/Wa/P[8]__AAA47290.1__P2_VP8*(65-223) (opt1)
aggagagucccgcagucggcguccagcggcucugcuuguucgugugugugucguugcaggccuuauucaagcuuaccaugcaguacaucaaggccaacagcaaguucaucggcaucaccgagcugggcagcggguccggccucgacgggcccuaccagccgacgaccuucaccccgcccaacgacuacuggauccugaucaacagcaacaccaacggcgucguguacgaguccacgaacaacagcgacuucuggaccgccguggucgccaucgagccccacgugaaccccguggaccgccaguacaccaucuucggggaguccaagcaguucaacgucagcaacgacuccaacaaguggaaguuccuggagauguuccggagcuccagccagaacgaguucuacaaccgccggacccucacguccgacacccgcuucgugggcauccugaaguacggcgggcggguguggaccuuccacggcgagacgccccgcgccaccaccgacagcuccagcaccgccaaccugaacaacaucuccaucaccauccacagcgaguucuacaucaucccccggagccaggaguccaagugcaacgaguacaucaacaacgggcugugaggacuagucccuguucccagagcccacuuuuuuuucuuuuuuugaaauaaaauagccugucuuucagaucucaaaggcucuuuucagagccaccaaaaaaaaaaaaaaaaaaaaaaaaaaaaaaaaaaaaaaaaaaaaaaaaaaaaaaaaaaaaaaaaaaaaaaaaaaaaaaaaaaaaaaaaaaaaaaaaaaaaa

SEQ ID NO: 1170 - RNA, 815 nt, Artificial Sequence; identical to SEQ ID NO: 1169
  mRNA product Design a-1 (hSL-A100) comprising derived and/or modified sequence from RVA/Wa/P[8]__AAA66953.1__P2_VP8*(65-223) (opt1)

SEQ ID NO: 1171 - RNA, 887 nt, Artificial Sequence
  mRNA product Design a-1 (hSL-A100) comprising derived and/or modified sequence from RVA/BE1058/P[4]__AEX30665.1__P2_VP8*(41-223) (opt1)
aggagagucccgcagucggcguccagcggcucugcuuguucgugugugugucguugcaggccuuauucaagcuuaccaugcaguacaucaaggccaacagcaaguucaucggcaucaccgagcugggcagcggguccggcgcccagacccgguacgcgcccgugaacuggggccacggggagaucaacgacagcaccaccgucgagcccgugcucgacggccccuaccagcccacgaccuucaagccgcccaacgacuacuggcugcugaucuccagcaacaccgacgggguggucuacgaguccaccaacaacagcgacuucuggacggccgugaucgccguggagccccacgucaaccagaccaaccgccaguacgugcuguucggcgagaacaagcaguucaacaucgagaacuccagcgacaaguggaaguucuucgagauguucaagggcaacucccagagcgacuucuccaaccggcgcacccugaccagcuccaaccggcugguggggaugcucaaguacggcgggcgcgucuggacguuccacggcgagaccccgcgggccaccaccgacagcuccagcacggccgaccugaacaacaucuccaucaucauccacagcgaguucuacaucaucccccgcagccaggaguccaagugcaacgaguacaucaacaacgggcugugaggacuagucccuguucccagagcccacuuuuuuuucuuuuuuugaaauaaaauagccugucuuucagaucucaaaggcucuuuucagagccaccaaaaaaaaaaaaaaaaaaaaaaaaaaaaaaaaaaaaaaaaaaaaaaaaaaaaaaaaaaaaaaaaaaaaaaaaaaaaaaaaaaaaaaaaaaaaaaaaaaaaa

SEQ ID NO: 1172 - RNA, 887 nt, Artificial Sequence
  mRNA product Design a-1 (hSL-A100) comprising derived and/or modified sequence from RVA/DS-1/P[4]__CAD62680.1__P2_VP8*(41-223) (opt1)
aggagagucccgcagucggcguccagcggcucugcuuguucgugugugugucguugcaggccuuauucaagcuuaccaugcaguacaucaaggccaacagcaaguucaucggcaucaccgagcugggcagcggguccggcgcccagacccgguacgcgcccgugaacuggggcuccugggagaucaacgacagcaccaccgucgagcccgugcucgacgggcccuaccagccgacgaccuucaagccgcccaacgacuacuggcugcugaucuccagcaacaccaacggcguggucuacgaguccaccaacaacaacgacuucuggacggccgugagcuccguggagccccacgucagccagaccaaccgccaguacauccucuucggggagaacaagcaguucaacguggagaacaacuccgacaaguggaaguucuucgagaccuucaccggcagcucccagggcaacuucagcaaccggcgcacgcugaccuccagcaaccggcugguggggaugcucaaguacggcgggcgcgucuggaccuuccacggcgagacgccccgggccaccaccgacuccagcaacaccgccgaccugaacaacaucagcaucaucauccacuccgaguucuacaucaucccccgcagccaggaguccaagugcaacgaguacaucaacaacgggcugugaggacuagucccuguucccagagcccacuuuuuuuucuuuuuuugaaauaaaauagccugucuuucagaucucaaaggcucuuuucagagccaccaaaaaaaaaaaaaaaaaaaaaaaaaaaaaaaaaaaaaaaaaaaaaaaaaaaaaaaaaaaaaaaaaaaaaaaaaaaaaaaaaaaaaaaaaaaaaaaaaaaaa

SEQ ID NO: 1173 - RNA, 887 nt, Artificial Sequence; identical to SEQ ID NO: 1172
  mRNA product Design a-1 (hSL-A100) comprising derived and/or modified sequence from RVA/DS-1/P[4]__ABV53252.1__P2_VP8*(41-223) (opt1)

SEQ ID NO: 1174 - RNA, 887 nt, Artificial Sequence
  mRNA product Design a-1 (hSL-A100) comprising derived and/or modified sequence from RVA/F01322/P[6]__AFA51886.1__P2_VP8*(41-223) (opt1)
aggagagucccgcagucggcguccagcggcucugcuuguucgugugugugucguugcaggccuuauucaagcuuaccaugcaguacaucaaggccaacagcaaguucaucggcaucaccgagcugggcagcggguccggcgcccagaccaacuacgcgcccgugaccuggagccacggcgaggugaacgacuccacgaccaucgagcccguccucgacgggcccuaccagccgaccaacuucaagccgcccaacgacuacuggauccugcugaaccccaccaaccagcagguggugcucgagggcacgaacaagaccgacaucugggucgcccugcugcucguggagccgaacgugaccaaccagagccggcaguacacccuguucggggagacgaagcagaucaccgucgagaacaacaccaacaaguggaaguucuucgagauguuccgcuccagcguguccgccgaguuccagcacaagcggacccugacgagcgacaccaagcucgccggcuucaugaaguucuacaacuccguguggaccuuccacggcgagacccccaacgccacgaccgacuacagcuccaccagcaaccuguucgaggucgagaccgugauccacguggaguucuacaucaucccccgcucccaggagagcaagugcuccgaguacaucaacacggggcugugaggacuagucccuguucccagagcccacuuuuuuuucuuuuuuugaaauaaaauagccugucuuucagaucucaaaggcucuuuucagagccaccaaaaaaaaaaaaaaaaaaaaaaaaaaaaaaaaaaaaaaaaaaaaaaaaaaaaaaaaaaaaaaaaaaaaaaaaaaaaaaaaaaaaaaaaaaaaaaaaaaaaa

SEQ ID NO: 1175 - RNA, 887 nt, Artificial Sequence
  mRNA product Design a-1 (hSL-A100) comprising derived and/or modified sequence from RVA/1076/P[6]__AAA47337.1__P2_VP8*(41-223) (opt1)
aggagagucccgcagucggcguccagcggcucugcuuguucgugugugugucguugcaggccuuauucaagcuuaccaugcaguacaucaaggccaacagcaaguucaucggcaucaccgagcugggcagcggguccggcgcccagaccaacuacgcgcccgugaccuggagccacggcgaggugaacgacagcacgaccaucgagcccguccucgacgggcccuaccagccgaccuccuucaagccgcccagcgacuacuggauccugcugaaccccaccaaccagcaggucgugcucgagggcacgaacaagaccgacaucuggguggcccugcugcucguggagcccaacgugaccaaccagucccggcaguacacccuguucggggagacgaagcagaucaccgucgagaacaacaccaacaaguggaaguucuucgagauguuccgcagcuccgugagcgccgaguuccagcacaagcggacccugacguccgacaccaagcucgccggcuuccugaaguucuacaacagcguguggaccuucuacggcgagacgccccacgccaccaccgacuacuccagcaccuccaaccugagcgaggucgagaccgcgauccacguggaguucuacaucaucccccgcucccaggagagcaagugcaacgaguacaucaacacggggcugugaggacuagucccuguucccagagcccacuuuuuuuucuuuuuuugaaauaaaauagccugucuuucagaucucaaaggcucuuuucagagccaccaaaaaaaaaaaaaaaaaaaaaaaaaaaaaaaaaaaaaaaaaaaaaaaaaaaaaaaaaaaaaaaaaaaaaaaaaaaaaaaaaaaaaaaaaaaaaaaaaaaaa

SEQ ID NO: 1176 - RNA, 887 nt, Artificial Sequence
  mRNA product Design a-1 (hSL-A100) comprising derived and/or modified sequence from RVA/BE1128/P[8]__AEX30671.1__P2_VP8*(41-223) (opt1)
aggagagucccgcagucggcguccagcggcucugcuuguucgugugugugucguugcaggccuuauucaagcuuaccaugcaguacaucaaggccaacagcaaguucaucggcaucaccgagcugggcagcggguccggcgcccagacccgguacgcgcccgugaacuggggccacggggagaucaacgacagcaccaccgucgagcccauccucgacggcccguaccagccgacgaccuucaccccgcccaccgacuacuggauccugaucacguccaacaccaacggggugguguacgagagcaccaacaacuccgacuucuggaccgccgucaucgccguggagccccacgugaacccggucgaccgccaguacaacguguucggcgagaacaagcaguucaacgugcggaacgacagcgacaaguggaaguuccuggagauguuccgcggcuccagccagaacgacuucuacaaccggcgcacgcucaccuccgacacccggcuggucgggauccugaaguacggcgggcgcguguggaccuuccacggcgagacgccccgggccaccaccgacagcuccaacaccgccaaccucgacgggaucagcaucacgauccacuccgaguucuacaucaucccccgcagccaggaguccaagugcaacgaguacaucaacaacggccugugaggacuagucccuguucccagagcccacuuuuuuuucuuuuuuugaaauaaaauagccugucuuucagaucucaaaggcucuuuucagagccaccaaaaaaaaaaaaaaaaaaaaaaaaaaaaaaaaaaaaaaaaaaaaaaaaaaaaaaaaaaaaaaaaaaaaaaaaaaaaaaaaaaaaaaaaaaaaaaaaaaaaa

SEQ ID NO: 1177 - RNA, 887 nt, Artificial Sequence
  mRNA product Design a-1 (hSL-A100) comprising derived and/or modified sequence from RVA/Wa-VirWa/P[8]__ACR22783.1__P2_VP8*(41-223) (opt1)
aggagagucccgcagucggcguccagcggcucugcuuguucgugugugugucguugcaggccuuauucaagcuuaccaugcaguacaucaaggccaacagcaaguucaucggcaucaccgagcugggcagcggguccggcgcccagacccgguacgcgcccgugaacugggggcacggcgagaucaacgacuccaccaccguggagcccauccucgacgggcccuaccagccgacgaccuucaccccgcccaacgacuacuggauccugaucaacagcaacaccaacggcgucguguacgaguccacgaacaacagcgacuucuggaccgccguggucgccaucgagccccacgugaacccgguggaccgccaguacaccaucuucggggaguccaagcaguucaacguccggaacgacagcaacaaguggaaguuccuggagauguuccgcuccagcucccagaacgaguucuacaaccggcgcacccucacgagcgacacccggcuggugggcauccugaaguacggcgggcgcguguggaccuuccacggcgagaccccgcgggccacgaccgacuccagcuccaccgccaaccucaacaacaucagcaucaccauccacuccgaguucuacaucaucccccgcagccaggagagcaagugcaacgaguacaucaacaacgggcugugaggacuagucccuguucccagagcccacuuuuuuuucuuuuuuugaaauaaaauagccugucuuucagaucucaaaggcucuuuucagagccaccaaaaaaaaaaaaaaaaaaaaaaaaaaaaaaaaaaaaaaaaaaaaaaaaaaaaaaaaaaaaaaaaaaaaaaaaaaaaaaaaaaaaaaaaaaaaaaaaaaaaa

SEQ ID NO: 1178 - RNA, 887 nt, Artificial Sequence
  mRNA product Design a-1 (hSL-A100) comprising derived and/or modified sequence from RVA/Wa/P[8]__AAA47290.1__P2_VP8*(41-223) (opt1)
aggagagucccgcagucggcguccagcggcucugcuuguucgugugugugucguugcaggccuuauucaagcuuaccaugcaguacaucaaggccaacagcaaguucaucggcaucaccgagcugggcagcggguccggcgcccagacccgguacgcgcccgugaacugggggcacggcgagaucaacgacuccaccaccguggagcccauccucgacgggcccuaccagccgacgaccuucaccccgcccaacgacuacuggauccugaucaacagcaacaccaacggcgucguguacgaguccacgaacaacagcgacuucuggaccgccguggucgccaucgagccccacgugaaccccguggaccgccaguacaccaucuucggggaguccaagcaguucaacgucagcaacgacuccaacaaguggaaguuccuggagauguuccggagcuccagccagaacgaguucuacaaccgccggacccucacguccgacacccgcuucgugggcauccugaaguacggcgggcggguguggaccuuccacggcgagacgccccgcgccaccaccgacagcuccagcaccgccaaccugaacaacaucuccaucaccauccacagcgaguucuacaucaucccccggagccaggaguccaagugcaacgaguacaucaacaacgggcugugaggacuagucccuguucccagagcccacuuuuuuuucuuuuuuugaaauaaaauagccugucuuucagaucucaaaggcucuuuucagagccaccaaaaaaaaaaaaaaaaaaaaaaaaaaaaaaaaaaaaaaaaaaaaaaaaaaaaaaaaaaaaaaaaaaaaaaaaaaaaaaaaaaaaaaaaaaaaaaaaaaaaa

SEQ ID NO: 1179 - RNA, 887 nt, Artificial Sequence
  mRNA product Design a-1 (hSL-A100) comprising derived and/or modified sequence from RVA/Wa/P[8]__AAA66953.1__P2_VP8*(41-223) (opt1)
aggagagucccgcagucggcguccagcggcucugcuuguucgugugugugucguugcaggccuuauucaagcuuaccaugcaguacaucaaggccaacagcaaguucaucggcaucaccgagcugggcagcggguccggcgcccagacccgguacgcgcccgugaacugggggcacggcgagaucaacgacuccaccaccguggagcccaugcucgacgggcccuaccagccgacgaccuucaccccgcccaacgacuacuggauccugaucaacagcaacaccaacggcgucguguacgaguccacgaacaacagcgacuucuggaccgccguggucgccaucgagccccacgugaaccccguggaccgccaguacaccaucuucggggaguccaagcaguucaacgucagcaacgacuccaacaaguggaaguuccuggagauguuccggagcuccagccagaacgaguucuacaaccgccggacccucacguccgacacccgcuucgugggcauccugaaguacggcgggcggguguggaccuuccacggcgagacgccccgcgccaccaccgacagcuccagcaccgccaaccugaacaacaucuccaucaccauccacagcgaguucuacaucaucccccggagccaggaguccaagugcaacgaguacaucaacaacgggcugugaggacuagucccuguucccagagcccacuuuuuuuucuuuuuuugaaauaaaauagccugucuuucagaucucaaaggcucuuuucagagccaccaaaaaaaaaaaaaaaaaaaaaaaaaaaaaaaaaaaaaaaaaaaaaaaaaaaaaaaaaaaaaaaaaaaaaaaaaaaaaaaaaaaaaaaaaaaaaaaaaaaaa

SEQ ID NO: 1180 - RNA, 1313 nt, Artificial Sequence
  mRNA product Design a-1 (hSL-A100) comprising derived and/or modified sequence from RVA/BE1058/P[4]__AEX30665.1__P2_VP8*(65-223)_Ferritin (opt1)
aggagagucccgcagucggcguccagcggcucugcuuguucgugugugugucguugcaggccuuauucaagcuuaccaugcaguacaucaaggccaacagcaaguucaucggcaucaccgagcugggcagcggguccggccucgacggccccuaccagcccacgaccuucaagccgcccaacgacuacuggcugcugaucuccagcaacaccgacgggguggucuacgaguccaccaacaacagcgacuucuggacggccgugaucgccguggagccccacgucaaccagaccaaccgccaguacgugcuguucggcgagaacaagcaguucaacaucgagaacuccagcgacaaguggaaguucuucgagauguucaagggcaacucccagagcgacuucuccaaccggcgcacccugaccagcuccaaccggcugguggggaugcucaaguacggcgggcgcgucuggacguuccacggcgagaccccgcgggccaccaccgacagcuccagcacggccgaccugaacaacaucuccaucaucauccacagcgaguucuacaucaucccccgcagccaggaguccaagugcaacgaguacaucaacaacgggcugagcggcggggacaucaucaagcuccugaacgagcaggugaacaaggagaugcaguccagcaaccuguacauguccaugagcuccuggugcuacacccacagccucgacggcgccgggcuguuccuguucgaccacgccgcggaggaguacgagcacgccaagaagcucaucaucuuccugaacgagaacaacguccccgugcagcugaccuccaucagcgccccggagcacaaguucgagggccucacgcagaucuuccagaaggccuacgagcacgagcagcacaucuccgagagcaucaacaacaucguggaccacgccaucaaguccaaggaccacgcgaccuucaacuuccugcagugguacgucgccgagcagcacgaggaggaggugcuguucaaggacauccucgacaagaucgagcugaucgggaacgagaaccacggccuguaccucgccgaccaguacgugaaggggaucgccaagagccgcaaguccugaggacuagucccuguucccagagcccacuuuuuuuucuuuuuuugaaauaaaauagccugucuuucagaucucaaaggcucuuuucagagccaccaaaaaaaaaaaaaaaaaaaaaaaaaaaaaaaaaaaaaaaaaaaaaaaaaaaaaaaaaaaaaaaaaaaaaaaaaaaaaaaaaaaaaaaaaaaaaaaaaaaaa

SEQ ID NO: 1181 - RNA, 1313 nt, Artificial Sequence
  mRNA product Design a-1 (hSL-A100) comprising derived and/or modified sequence from RVA/DS-1/P[4]__CAD62680.1__P2_VP8*(65-223)_Ferritin (opt1)
aggagagucccgcagucggcguccagcggcucugcuuguucgugugugugucguugcaggccuuauucaagcuuaccaugcaguacaucaaggccaacagcaaguucaucggcaucaccgagcugggcagcggguccggccucgacgggcccuaccagccgacgaccuucaagccgcccaacgacuacuggcugcugaucuccagcaacaccaacggcguggucuacgaguccaccaacaacaacgacuucuggacggccgugagcuccguggagccccacgucagccagaccaaccgccaguacauccucuucggggagaacaagcaguucaacguggagaacaacuccgacaaguggaaguucuucgagaccuucaccggcagcucccagggcaacuucagcaaccggcgcacgcugaccuccagcaaccggcugguggggaugcucaaguacggcgggcgcgucuggaccuuccacggcgagacgccccgggccaccaccgacuccagcaacaccgccgaccugaacaacaucagcaucaucauccacuccgaguucuacaucaucccccgcagccaggaguccaagugcaacgaguacaucaacaacgggcugagcggcggggacaucaucaagcuccugaacgagcaggugaacaaggagaugcaguccagcaaccuguacauguccaugagcuccuggugcuacacccacagccucgacggcgccgggcuguuccuguucgaccacgccgcggaggaguacgagcacgccaagaagcucaucaucuuccugaacgagaacaacguccccgugcagcugaccuccaucagcgccccggagcacaaguucgagggccucacgcagaucuuccagaaggccuacgagcacgagcagcacaucuccgagagcaucaacaacaucguggaccacgccaucaaguccaaggaccacgcgaccuucaacuuccugcagugguacgucgccgagcagcacgaggaggaggugcuguucaaggacauccucgacaagaucgagcugaucgggaacgagaaccacggccuguaccucgccgaccaguacgugaaggggaucgccaagagccgcaaguccugaggacuagucccuguucccagagcccacuuuuuuuucuuuuuuugaaauaaaauagccugucuuucagaucucaaaggcucuuuucagagccaccaaaaaaaaaaaaaaaaaaaaaaaaaaaaaaaaaaaaaaaaaaaaaaaaaaaaaaaaaaaaaaaaaaaaaaaaaaaaaaaaaaaaaaaaaaaaaaaaaaaaa

SEQ ID NO: 1182 - RNA, 1313 nt, Artificial Sequence; identical to SEQ ID NO: 1181
  mRNA product Design a-1 (hSL-A100) comprising derived and/or modified sequence from RVA/DS-1/P[4]__ABV53252.1__P2_VP8*(65-223)_Ferritin (opt1)

SEQ ID NO: 1183 - RNA, 1313 nt, Artificial Sequence
  mRNA product Design a-1 (hSL-A100) comprising derived and/or modified sequence from RVA/F01322/P[6]__AFA51886.1__P2_VP8*(65-223)_Ferritin (opt1)
aggagagucccgcagucggcguccagcggcucugcuuguucgugugugugucguugcaggccuuauucaagcuuaccaugcaguacaucaaggccaacagcaaguucaucggcaucaccgagcugggcagcggguccggccucgacgggcccuaccagccgaccaacuucaagccgcccaacgacuacuggauccugcugaaccccaccaaccagcagguggugcucgagggcacgaacaagaccgacaucugggucgcccugcugcucguggagccgaacgugaccaaccagagccggcaguacacccuguucggggagacgaagcagaucaccgucgagaacaacaccaacaaguggaaguucuucgagauguuccgcuccagcguguccgccgaguuccagcacaagcggacccugacgagcgacaccaagcucgccggcuucaugaaguucuacaacuccguguggaccuuccacggcgagacccccaacgccacgaccgacuacagcuccaccagcaaccuguucgaggucgagaccgugauccacguggaguucuacaucaucccccgcucccaggagagcaagugcuccgaguacaucaacacggggcugagcggcggggacaucaucaagcuccugaacgagcaggugaacaaggagaugcaguccagcaaccuguacauguccaugagcuccuggugcuacacccacagccucgacggcgccgggcuguuccuguucgaccacgccgcggaggaguacgagcacgccaagaagcucaucaucuuccugaacgagaacaacguccccgugcagcugaccuccaucagcgccccggagcacaaguucgagggccucacgcagaucuuccagaaggccuacgagcacgagcagcacaucuccgagagcaucaacaacaucguggaccacgccaucaaguccaaggaccacgcgaccuucaacuuccugcagugguacgucgccgagcagcacgaggaggaggugcuguucaaggacauccucgacaagaucgagcugaucgggaacgagaaccacggccuguaccucgccgaccaguacgugaaggggaucgccaagagccgcaaguccugaggacuagucccuguucccagagcccacuuuuuuuucuuuuuuugaaauaaaauagccugucuuucagaucucaaaggcucuuuucagagccaccaaaaaaaaaaaaaaaaaaaaaaaaaaaaaaaaaaaaaaaaaaaaaaaaaaaaaaaaaaaaaaaaaaaaaaaaaaaaaaaaaaaaaaaaaaaaaaaaaaaaa

SEQ ID NO: 1184 - RNA, 1313 nt, Artificial Sequence
  mRNA product Design a-1 (hSL-A100) comprising derived and/or modified sequence from RVA/1076/P[6]__AAA47337.1__P2_VP8*(65-223)_Ferritin (opt1)
aggagagucccgcagucggcguccagcggcucugcuuguucgugugugugucguugcaggccuuauucaagcuuaccaugcaguacaucaaggccaacagcaaguucaucggcaucaccgagcugggcagcggguccggccucgacgggcccuaccagccgaccuccuucaagccgcccagcgacuacuggauccugcugaaccccaccaaccagcaggucgugcucgagggcacgaacaagaccgacaucuggguggcccugcugcucguggagcccaacgugaccaaccagucccggcaguacacccuguucggggagacgaagcagaucaccgucgagaacaacaccaacaaguggaaguucuucgagauguuccgcagcuccgugagcgccgaguuccagcacaagcggacccugacguccgacaccaagcucgccggcuuccugaaguucuacaacagcguguggaccuucuacggcgagacgccccacgccaccaccgacuacuccagcaccuccaaccugagcgaggucgagaccgcgauccacguggaguucuacaucaucccccgcucccaggagagcaagugcaacgaguacaucaacacggggcugagcggcggggacaucaucaagcuccugaacgagcaggugaacaaggagaugcaguccagcaaccuguacauguccaugagcuccuggugcuacacccacagccucgacggcgccgggcuguuccuguucgaccacgccgcggaggaguacgagcacgccaagaagcucaucaucuuccugaacgagaacaacguccccgugcagcugaccuccaucagcgccccggagcacaaguucgagggccucacgcagaucuuccagaaggccuacgagcacgagcagcacaucuccgagagcaucaacaacaucguggaccacgccaucaaguccaaggaccacgcgaccuucaacuuccugcagugguacgucgccgagcagcacgaggaggaggugcuguucaaggacauccucgacaagaucgagcugaucgggaacgagaaccacggccuguaccucgccgaccaguacgugaaggggaucgccaagagccgcaaguccugaggacuagucccuguucccagagcccacuuuuuuuucuuuuuuugaaauaaaauagccugucuuucagaucucaaaggcucuuuucagagccaccaaaaaaaaaaaaaaaaaaaaaaaaaaaaaaaaaaaaaaaaaaaaaaaaaaaaaaaaaaaaaaaaaaaaaaaaaaaaaaaaaaaaaaaaaaaaaaaaaaaaa

SEQ ID NO: 1185 - RNA, 1313 nt, Artificial Sequence
  mRNA product Design a-1 (hSL-A100) comprising derived and/or modified sequence from RVA/BE1128/P[8]__AEX30671.1__P2_VP8*(65-223)_Ferritin (opt1) R8577
aggagagucccgcagucggcguccagcggcucugcuuguucgugugugugucguugcaggccuuauucaagcuuaccaugcaguacaucaaggccaacagcaaguucaucggcaucaccgagcugggcagcggguccggccucgacggcccguaccagccgacgaccuucaccccgcccaccgacuacuggauccugaucacguccaacaccaacggggugguguacgagagcaccaacaacuccgacuucuggaccgccgucaucgccguggagccccacgugaacccggucgaccgccaguacaacguguucggcgagaacaagcaguucaacgugcggaacgacagcgacaaguggaaguuccuggagauguuccgcggcuccagccagaacgacuucuacaaccggcgcacgcucaccuccgacacccggcuggucgggauccugaaguacggcgggcgcguguggaccuuccacggcgagacgccccgggccaccaccgacagcuccaacaccgccaaccucgacgggaucagcaucacgauccacuccgaguucuacaucaucccccgcagccaggaguccaagugcaacgaguacaucaacaacggccugagcggcggggacaucaucaagcuccugaacgagcaggugaacaaggagaugcaguccagcaaccuguacauguccaugagcuccuggugcuacacccacagccucgacggcgccgggcuguuccuguucgaccacgccgcggaggaguacgagcacgccaagaagcucaucaucuuccugaacgagaacaacguccccgugcagcugaccuccaucagcgccccggagcacaaguucgagggccucacgcagaucuuccagaaggccuacgagcacgagcagcacaucuccgagagcaucaacaacaucguggaccacgccaucaaguccaaggaccacgcgaccuucaacuuccugcagugguacgucgccgagcagcacgaggaggaggugcuguucaaggacauccucgacaagaucgagcugaucgggaacgagaaccacggccuguaccucgccgaccaguacgugaaggggaucgccaagagccgcaaguccugaggacuagucccuguucccagagcccacuuuuuuuucuuuuuuugaaauaaaauagccugucuuucagaucucaaaggcucuuuucagagccaccaaaaaaaaaaaaaaaaaaaaaaaaaaaaaaaaaaaaaaaaaaaaaaaaaaaaaaaaaaaaaaaaaaaaaaaaaaaaaaaaaaaaaaaaaaaaaaaaaaaaa

SEQ ID NO: 1186 - RNA, 1313 nt, Artificial Sequence
  mRNA product Design a-1 (hSL-A100) comprising derived and/or modified sequence from RVA/Wa-VirWa/P[8]__ACR22783.1__P2_VP8*(65-223)_Ferritin (opt1)
aggagagucccgcagucggcguccagcggcucugcuuguucgugugugugucguugcaggccuuauucaagcuuaccaugcaguacaucaaggccaacagcaaguucaucggcaucaccgagcugggcagcggguccggccucgacgggcccuaccagccgacgaccuucaccccgcccaacgacuacuggauccugaucaacagcaacaccaacggcgucguguacgaguccacgaacaacagcgacuucuggaccgccguggucgccaucgagccccacgugaacccgguggaccgccaguacaccaucuucggggaguccaagcaguucaacguccggaacgacagcaacaaguggaaguuccuggagauguuccgcuccagcucccagaacgaguucuacaaccggcgcacccucacgagcgacacccggcuggugggcauccugaaguacggcgggcgcguguggaccuuccacggcgagaccccgcgggccacgaccgacuccagcuccaccgccaaccucaacaacaucagcaucaccauccacuccgaguucuacaucaucccccgcagccaggagagcaagugcaacgaguacaucaacaacgggcugagcggcggggacaucaucaagcuccugaacgagcaggugaacaaggagaugcaguccagcaaccuguacauguccaugagcuccuggugcuacacccacagccucgacggcgccgggcuguuccuguucgaccacgccgcggaggaguacgagcacgccaagaagcucaucaucuuccugaacgagaacaacguccccgugcagcugaccuccaucagcgccccggagcacaaguucgagggccucacgcagaucuuccagaaggccuacgagcacgagcagcacaucuccgagagcaucaacaacaucguggaccacgccaucaaguccaaggaccacgcgaccuucaacuuccugcagugguacgucgccgagcagcacgaggaggaggugcuguucaaggacauccucgacaagaucgagcugaucgggaacgagaaccacggccuguaccucgccgaccaguacgugaaggggaucgccaagagccgcaaguccugaggacuagucccuguucccagagcccacuuuuuuuucuuuuuuugaaauaaaauagccugucuuucagaucucaaaggcucuuuucagagccaccaaaaaaaaaaaaaaaaaaaaaaaaaaaaaaaaaaaaaaaaaaaaaaaaaaaaaaaaaaaaaaaaaaaaaaaaaaaaaaaaaaaaaaaaaaaaaaaaaaaaa

SEQ ID NO: 1187 - RNA, 1313 nt, Artificial Sequence
  mRNA product Design a-1 (hSL-A100) comprising derived and/or modified sequence from RVA/Wa/P[8]__AAA47290.1__P2_VP8*(65-223)_Ferritin (opt1)
aggagagucccgcagucggcguccagcggcucugcuuguucgugugugugucguugcaggccuuauucaagcuuaccaugcaguacaucaaggccaacagcaaguucaucggcaucaccgagcugggcagcggguccggccucgacgggcccuaccagccgacgaccuucaccccgcccaacgacuacuggauccugaucaacagcaacaccaacggcgucguguacgaguccacgaacaacagcgacuucuggaccgccguggucgccaucgagccccacgugaaccccguggaccgccaguacaccaucuucggggaguccaagcaguucaacgucagcaacgacuccaacaaguggaaguuccuggagauguuccggagcuccagccagaacgaguucuacaaccgccggacccucacguccgacacccgcuucgugggcauccugaaguacggcgggcggguguggaccuuccacggcgagacgccccgcgccaccaccgacagcuccagcaccgccaaccugaacaacaucuccaucaccauccacagcgaguucuacaucaucccccggagccaggaguccaagugcaacgaguacaucaacaacgggcugagcggcggggacaucaucaagcuccugaacgagcaggugaacaaggagaugcaguccagcaaccuguacauguccaugagcuccuggugcuacacccacagccucgacggcgccgggcuguuccuguucgaccacgccgcggaggaguacgagcacgccaagaagcucaucaucuuccugaacgagaacaacguccccgugcagcugaccuccaucagcgccccggagcacaaguucgagggccucacgcagaucuuccagaaggccuacgagcacgagcagcacaucuccgagagcaucaacaacaucguggaccacgccaucaaguccaaggaccacgcgaccuucaacuuccugcagugguacgucgccgagcagcacgaggaggaggugcuguucaaggacauccucgacaagaucgagcugaucgggaacgagaaccacggccuguaccucgccgaccaguacgugaaggggaucgccaagagccgcaaguccugaggacuagucccuguucccagagcccacuuuuuuuucuuuuuuugaaauaaaauagccugucuuucagaucucaaaggcucuuuucagagccaccaaaaaaaaaaaaaaaaaaaaaaaaaaaaaaaaaaaaaaaaaaaaaaaaaaaaaaaaaaaaaaaaaaaaaaaaaaaaaaaaaaaaaaaaaaaaaaaaaaaaa

SEQ ID NO: 1188 - RNA, 1313 nt, Artificial Sequence; identical to SEQ ID NO: 1187
  mRNA product Design a-1 (hSL-A100) comprising derived and/or modified sequence from RVA/Wa/P[8]__AAA66953.1__P2_VP8*(65-223)_Ferritin (opt1)

SEQ ID NO: 1189 - RNA, 1385 nt, Artificial Sequence
  mRNA product Design a-1 (hSL-A100) comprising derived and/or modified sequence from RVA/BE1058/P[4]__AEX30665.1__P2_VP8*(41-223)_Ferritin (opt1)
aggagagucccgcagucggcguccagcggcucugcuuguucgugugugugucguugcaggccuuauucaagcuuaccaugcaguacaucaaggccaacagcaaguucaucggcaucaccgagcugggcagcggguccggcgcccagacccgguacgcgcccgugaacuggggccacggggagaucaacgacagcaccaccgucgagcccgugcucgacggccccuaccagcccacgaccuucaagccgcccaacgacuacuggcugcugaucuccagcaacaccgacgggguggucuacgaguccaccaacaacagcgacuucuggacggccgugaucgccguggagccccacgucaaccagaccaaccgccaguacgugcuguucggcgagaacaagcaguucaacaucgagaacuccagcgacaaguggaaguucuucgagauguucaagggcaacucccagagcgacuucuccaaccggcgcacccugaccagcuccaaccggcugguggggaugcucaaguacggcgggcgcgucuggacguuccacggcgagaccccgcgggccaccaccgacagcuccagcacggccgaccugaacaacaucuccaucaucauccacagcgaguucuacaucaucccccgcagccaggaguccaagugcaacgaguacaucaacaacgggcugagcggcggggacaucaucaagcuccugaacgagcaggugaacaaggagaugcaguccagcaaccuguacauguccaugagcuccuggugcuacacccacagccucgacggcgccgggcuguuccuguucgaccacgccgcggaggaguacgagcacgccaagaagcucaucaucuuccugaacgagaacaacguccccgugcagcugaccuccaucagcgccccggagcacaaguucgagggccucacgcagaucuuccagaaggccuacgagcacgagcagcacaucuccgagagcaucaacaacaucguggaccacgccaucaaguccaaggaccacgcgaccuucaacuuccugcagugguacgucgccgagcagcacgaggaggaggugcuguucaaggacauccucgacaagaucgagcugaucgggaacgagaaccacggccuguaccucgccgaccaguacgugaaggggaucgccaagagccgcaaguccugaggacuagucccuguucccagagcccacuuuuuuuucuuuuuuugaaauaaaauagccugucuuucagaucucaaaggcucuuuucagagccaccaaaaaaaaaaaaaaaaaaaaaaaaaaaaaaaaaaaaaaaaaaaaaaaaaaaaaaaaaaaaaaaaaaaaaaaaaaaaaaaaaaaaaaaaaaaaaaaaaaaaa

SEQ ID NO: 1190 - RNA, 1385 nt, Artificial Sequence
  mRNA product Design a-1 (hSL-A100) comprising derived and/or modified sequence from RVA/DS-1/P[4]__CAD62680.1__P2_VP8*(41-223)_Ferritin (opt1)
aggagagucccgcagucggcguccagcggcucugcuuguucgugugugugucguugcaggccuuauucaagcuuaccaugcaguacaucaaggccaacagcaaguucaucggcaucaccgagcugggcagcggguccggcgcccagacccgguacgcgcccgugaacuggggcuccugggagaucaacgacagcaccaccgucgagcccgugcucgacgggcccuaccagccgacgaccuucaagccgcccaacgacuacuggcugcugaucuccagcaacaccaacggcguggucuacgaguccaccaacaacaacgacuucuggacggccgugagcuccguggagccccacgucagccagaccaaccgccaguacauccucuucggggagaacaagcaguucaacguggagaacaacuccgacaaguggaaguucuucgagaccuucaccggcagcucccagggcaacuucagcaaccggcgcacgcugaccuccagcaaccggcugguggggaugcucaaguacggcgggcgcgucuggaccuuccacggcgagacgccccgggccaccaccgacuccagcaacaccgccgaccugaacaacaucagcaucaucauccacuccgaguucuacaucaucccccgcagccaggaguccaagugcaacgaguacaucaacaacgggcugagcggcggggacaucaucaagcuccugaacgagcaggugaacaaggagaugcaguccagcaaccuguacauguccaugagcuccuggugcuacacccacagccucgacggcgccgggcuguuccuguucgaccacgccgcggaggaguacgagcacgccaagaagcucaucaucuuccugaacgagaacaacguccccgugcagcugaccuccaucagcgccccggagcacaaguucgagggccucacgcagaucuuccagaaggccuacgagcacgagcagcacaucuccgagagcaucaacaacaucguggaccacgccaucaaguccaaggaccacgcgaccuucaacuuccugcagugguacgucgccgagcagcacgaggaggaggugcuguucaaggacauccucgacaagaucgagcugaucgggaacgagaaccacggccuguaccucgccgaccaguacgugaaggggaucgccaagagccgcaaguccugaggacuagucccuguucccagagcccacuuuuuuuucuuuuuuugaaauaaaauagccugucuuucagaucucaaaggcucuuuucagagccaccaaaaaaaaaaaaaaaaaaaaaaaaaaaaaaaaaaaaaaaaaaaaaaaaaaaaaaaaaaaaaaaaaaaaaaaaaaaaaaaaaaaaaaaaaaaaaaaaaaaaa

SEQ ID NO: 1191 - RNA, 1385 nt, Artificial Sequence; identical to SEQ ID NO: 1190
  mRNA product Design a-1 (hSL-A100) comprising derived and/or modified sequence from RVA/DS-1/P[4]__ABV53252.1__P2_VP8*(41-223)_Ferritin (opt1)

SEQ ID NO: 1192 - RNA, 1385 nt, Artificial Sequence
  mRNA product Design a-1 (hSL-A100) comprising derived and/or modified sequence from RVA/F01322/P[6]__AFA51886.1__P2_VP8*(41-223)_Ferritin (opt1)
aggagagucccgcagucggcguccagcggcucugcuuguucgugugugugucguugcaggccuuauucaagcuuaccaugcaguacaucaaggccaacagcaaguucaucggcaucaccgagcugggcagcggguccggcgcccagaccaacuacgcgcccgugaccuggagccacggcgaggugaacgacuccacgaccaucgagcccguccucgacgggcccuaccagccgaccaacuucaagccgcccaacgacuacuggauccugcugaaccccaccaaccagcagguggugcucgagggcacgaacaagaccgacaucugggucgcccugcugcucguggagccgaacgugaccaaccagagccggcaguacacccuguucggggagacgaagcagaucaccgucgagaacaacaccaacaaguggaaguucuucgagauguuccgcuccagcguguccgccgaguuccagcacaagcggacccugacgagcgacaccaagcucgccggcuucaugaaguucuacaacuccguguggaccuuccacggcgagacccccaacgccacgaccgacuacagcuccaccagcaaccuguucgaggucgagaccgugauccacguggaguucuacaucaucccccgcucccaggagagcaagugcuccgaguacaucaacacggggcugagcggcggggacaucaucaagcuccugaacgagcaggugaacaaggagaugcaguccagcaaccuguacauguccaugagcuccuggugcuacacccacagccucgacggcgccgggcuguuccuguucgaccacgccgcggaggaguacgagcacgccaagaagcucaucaucuuccugaacgagaacaacguccccgugcagcugaccuccaucagcgccccggagcacaaguucgagggccucacgcagaucuuccagaaggccuacgagcacgagcagcacaucuccgagagcaucaacaacaucguggaccacgccaucaaguccaaggaccacgcgaccuucaacuuccugcagugguacgucgccgagcagcacgaggaggaggugcuguucaaggacauccucgacaagaucgagcugaucgggaacgagaaccacggccuguaccucgccgaccaguacgugaaggggaucgccaagagccgcaaguccugaggacuagucccuguucccagagcccacuuuuuuuucuuuuuuugaaauaaaauagccugucuuucagaucucaaaggcucuuuucagagccaccaaaaaaaaaaaaaaaaaaaaaaaaaaaaaaaaaaaaaaaaaaaaaaaaaaaaaaaaaaaaaaaaaaaaaaaaaaaaaaaaaaaaaaaaaaaaaaaaaaaaa

SEQ ID NO: 1193 - RNA, 1385 nt, Artificial Sequence
  mRNA product Design a-1 (hSL-A100) comprising derived and/or modified sequence from RVA/1076/P[6]__AAA47337.1__P2_VP8*(41-223)_Ferritin (opt1)
aggagagucccgcagucggcguccagcggcucugcuuguucgugugugugucguugcaggccuuauucaagcuuaccaugcaguacaucaaggccaacagcaaguucaucggcaucaccgagcugggcagcggguccggcgcccagaccaacuacgcgcccgugaccuggagccacggcgaggugaacgacagcacgaccaucgagcccguccucgacgggcccuaccagccgaccuccuucaagccgcccagcgacuacuggauccugcugaaccccaccaaccagcaggucgugcucgagggcacgaacaagaccgacaucuggguggcccugcugcucguggagcccaacgugaccaaccagucccggcaguacacccuguucggggagacgaagcagaucaccgucgagaacaacaccaacaaguggaaguucuucgagauguuccgcagcuccgugagcgccgaguuccagcacaagcggacccugacguccgacaccaagcucgccggcuuccugaaguucuacaacagcguguggaccuucuacggcgagacgccccacgccaccaccgacuacuccagcaccuccaaccugagcgaggucgagaccgcgauccacguggaguucuacaucaucccccgcucccaggagagcaagugcaacgaguacaucaacacggggcugagcggcggggacaucaucaagcuccugaacgagcaggugaacaaggagaugcaguccagcaaccuguacauguccaugagcuccuggugcuacacccacagccucgacggcgccgggcuguuccuguucgaccacgccgcggaggaguacgagcacgccaagaagcucaucaucuuccugaacgagaacaacguccccgugcagcugaccuccaucagcgccccggagcacaaguucgagggccucacgcagaucuuccagaaggccuacgagcacgagcagcacaucuccgagagcaucaacaacaucguggaccacgccaucaaguccaaggaccacgcgaccuucaacuuccugcagugguacgucgccgagcagcacgaggaggaggugcuguucaaggacauccucgacaagaucgagcugaucgggaacgagaaccacggccuguaccucgccgaccaguacgugaaggggaucgccaagagccgcaaguccugaggacuagucccuguucccagagcccacuuuuuuuucuuuuuuugaaauaaaauagccugucuuucagaucucaaaggcucuuuucagagccaccaaaaaaaaaaaaaaaaaaaaaaaaaaaaaaaaaaaaaaaaaaaaaaaaaaaaaaaaaaaaaaaaaaaaaaaaaaaaaaaaaaaaaaaaaaaaaaaaaaaaa

SEQ ID NO: 1194 - RNA, 1385 nt, Artificial Sequence
  mRNA product Design a-1 (hSL-A100) comprising derived and/or modified sequence from RVA/BE1128/P[8]__AEX30671.1__P2_VP8*(41-223)_Ferritin (opt1)
aggagagucccgcagucggcguccagcggcucugcuuguucgugugugugucguugcaggccuuauucaagcuuaccaugcaguacaucaaggccaacagcaaguucaucggcaucaccgagcugggcagcggguccggcgcccagacccgguacgcgcccgugaacuggggccacggggagaucaacgacagcaccaccgucgagcccauccucgacggcccguaccagccgacgaccuucaccccgcccaccgacuacuggauccugaucacguccaacaccaacggggugguguacgagagcaccaacaacuccgacuucuggaccgccgucaucgccguggagccccacgugaacccggucgaccgccaguacaacguguucggcgagaacaagcaguucaacgugcggaacgacagcgacaaguggaaguuccuggagauguuccgcggcuccagccagaacgacuucuacaaccggcgcacgcucaccuccgacacccggcuggucgggauccugaaguacggcgggcgcguguggaccuuccacggcgagacgccccgggccaccaccgacagcuccaacaccgccaaccucgacgggaucagcaucacgauccacuccgaguucuacaucaucccccgcagccaggaguccaagugcaacgaguacaucaacaacggccugagcggcggggacaucaucaagcuccugaacgagcaggugaacaaggagaugcaguccagcaaccuguacauguccaugagcuccuggugcuacacccacagccucgacggcgccgggcuguuccuguucgaccacgccgcggaggaguacgagcacgccaagaagcucaucaucuuccugaacgagaacaacguccccgugcagcugaccuccaucagcgccccggagcacaaguucgagggccucacgcagaucuuccagaaggccuacgagcacgagcagcacaucuccgagagcaucaacaacaucguggaccacgccaucaaguccaaggaccacgcgaccuucaacuuccugcagugguacgucgccgagcagcacgaggaggaggugcuguucaaggacauccucgacaagaucgagcugaucgggaacgagaaccacggccuguaccucgccgaccaguacgugaaggggaucgccaagagccgcaaguccugaggacuagucccuguucccagagcccacuuuuuuuucuuuuuuugaaauaaaauagccugucuuucagaucucaaaggcucuuuucagagccaccaaaaaaaaaaaaaaaaaaaaaaaaaaaaaaaaaaaaaaaaaaaaaaaaaaaaaaaaaaaaaaaaaaaaaaaaaaaaaaaaaaaaaaaaaaaaaaaaaaaaa

SEQ ID NO: 1195 - RNA, 1385 nt, Artificial Sequence
  mRNA product Design a-1 (hSL-A100) comprising derived and/or modified sequence from RVA/Wa-VirWa/P[8]__ACR22783.1__P2_VP8*(41-223)_Ferritin (opt1)
aggagagucccgcagucggcguccagcggcucugcuuguucgugugugugucguugcaggccuuauucaagcuuaccaugcaguacaucaaggccaacagcaaguucaucggcaucaccgagcugggcagcggguccggcgcccagacccgguacgcgcccgugaacugggggcacggcgagaucaacgacuccaccaccguggagcccauccucgacgggcccuaccagccgacgaccuucaccccgcccaacgacuacuggauccugaucaacagcaacaccaacggcgucguguacgaguccacgaacaacagcgacuucuggaccgccguggucgccaucgagccccacgugaacccgguggaccgccaguacaccaucuucggggaguccaagcaguucaacguccggaacgacagcaacaaguggaaguuccuggagauguuccgcuccagcucccagaacgaguucuacaaccggcgcacccucacgagcgacacccggcuggugggcauccugaaguacggcgggcgcguguggaccuuccacggcgagaccccgcgggccacgaccgacuccagcuccaccgccaaccucaacaacaucagcaucaccauccacuccgaguucuacaucaucccccgcagccaggagagcaagugcaacgaguacaucaacaacgggcugagcggcggggacaucaucaagcuccugaacgagcaggugaacaaggagaugcaguccagcaaccuguacauguccaugagcuccuggugcuacacccacagccucgacggcgccgggcuguuccuguucgaccacgccgcggaggaguacgagcacgccaagaagcucaucaucuuccugaacgagaacaacguccccgugcagcugaccuccaucagcgccccggagcacaaguucgagggccucacgcagaucuuccagaaggccuacgagcacgagcagcacaucuccgagagcaucaacaacaucguggaccacgccaucaaguccaaggaccacgcgaccuucaacuuccugcagugguacgucgccgagcagcacgaggaggaggugcuguucaaggacauccucgacaagaucgagcugaucgggaacgagaaccacggccuguaccucgccgaccaguacgugaaggggaucgccaagagccgcaaguccugaggacuagucccuguucccagagcccacuuuuuuuucuuuuuuugaaauaaaauagccugucuuucagaucucaaaggcucuuuucagagccaccaaaaaaaaaaaaaaaaaaaaaaaaaaaaaaaaaaaaaaaaaaaaaaaaaaaaaaaaaaaaaaaaaaaaaaaaaaaaaaaaaaaaaaaaaaaaaaaaaaaaa

SEQ ID NO: 1196 - RNA, 1385 nt, Artificial Sequence
  mRNA product Design a-1 (hSL-A100) comprising derived and/or modified sequence from RVA/Wa/P[8]__AAA47290.1__P2_VP8*(41-223)_Ferritin (opt1)
aggagagucccgcagucggcguccagcggcucugcuuguucgugugugugucguugcaggccuuauucaagcuuaccaugcaguacaucaaggccaacagcaaguucaucggcaucaccgagcugggcagcggguccggcgcccagacccgguacgcgcccgugaacugggggcacggcgagaucaacgacuccaccaccguggagcccauccucgacgggcccuaccagccgacgaccuucaccccgcccaacgacuacuggauccugaucaacagcaacaccaacggcgucguguacgaguccacgaacaacagcgacuucuggaccgccguggucgccaucgagccccacgugaaccccguggaccgccaguacaccaucuucggggaguccaagcaguucaacgucagcaacgacuccaacaaguggaaguuccuggagauguuccggagcuccagccagaacgaguucuacaaccgccggacccucacguccgacacccgcuucgugggcauccugaaguacggcgggcggguguggaccuuccacggcgagacgccccgcgccaccaccgacagcuccagcaccgccaaccugaacaacaucuccaucaccauccacagcgaguucuacaucaucccccggagccaggaguccaagugcaacgaguacaucaacaacgggcugagcggcggggacaucaucaagcuccugaacgagcaggugaacaaggagaugcaguccagcaaccuguacauguccaugagcuccuggugcuacacccacagccucgacggcgccgggcuguuccuguucgaccacgccgcggaggaguacgagcacgccaagaagcucaucaucuuccugaacgagaacaacguccccgugcagcugaccuccaucagcgccccggagcacaaguucgagggccucacgcagaucuuccagaaggccuacgagcacgagcagcacaucuccgagagcaucaacaacaucguggaccacgccaucaaguccaaggaccacgcgaccuucaacuuccugcagugguacgucgccgagcagcacgaggaggaggugcuguucaaggacauccucgacaagaucgagcugaucgggaacgagaaccacggccuguaccucgccgaccaguacgugaaggggaucgccaagagccgcaaguccugaggacuagucccuguucccagagcccacuuuuuuuucuuuuuuugaaauaaaauagccugucuuucagaucucaaaggcucuuuucagagccaccaaaaaaaaaaaaaaaaaaaaaaaaaaaaaaaaaaaaaaaaaaaaaaaaaaaaaaaaaaaaaaaaaaaaaaaaaaaaaaaaaaaaaaaaaaaaaaaaaaaaa

SEQ ID NO: 1197 - RNA, 1385 nt, Artificial Sequence
  mRNA product Design a-1 (hSL-A100) comprising derived and/or modified sequence from RVA/Wa/P[8]__AAA66953.1__P2_VP8*(41-223)_Ferritin (opt1)
aggagagucccgcagucggcguccagcggcucugcuuguucgugugugugucguugcaggccuuauucaagcuuaccaugcaguacaucaaggccaacagcaaguucaucggcaucaccgagcugggcagcggguccggcgcccagacccgguacgcgcccgugaacugggggcacggcgagaucaacgacuccaccaccguggagcccaugcucgacgggcccuaccagccgacgaccuucaccccgcccaacgacuacuggauccugaucaacagcaacaccaacggcgucguguacgaguccacgaacaacagcgacuucuggaccgccguggucgccaucgagccccacgugaaccccguggaccgccaguacaccaucuucggggaguccaagcaguucaacgucagcaacgacuccaacaaguggaaguuccuggagauguuccggagcuccagccagaacgaguucuacaaccgccggacccucacguccgacacccgcuucgugggcauccugaaguacggcgggcggguguggaccuuccacggcgagacgccccgcgccaccaccgacagcuccagcaccgccaaccugaacaacaucuccaucaccauccacagcgaguucuacaucaucccccggagccaggaguccaagugcaacgaguacaucaacaacgggcugagcggcggggacaucaucaagcuccugaacgagcaggugaacaaggagaugcaguccagcaaccuguacauguccaugagcuccuggugcuacacccacagccucgacggcgccgggcuguuccuguucgaccacgccgcggaggaguacgagcacgccaagaagcucaucaucuuccugaacgagaacaacguccccgugcagcugaccuccaucagcgccccggagcacaaguucgagggccucacgcagaucuuccagaaggccuacgagcacgagcagcacaucuccgagagcaucaacaacaucguggaccacgccaucaaguccaaggaccacgcgaccuucaacuuccugcagugguacgucgccgagcagcacgaggaggaggugcuguucaaggacauccucgacaagaucgagcugaucgggaacgagaaccacggccuguaccucgccgaccaguacgugaaggggaucgccaagagccgcaaguccugaggacuagucccuguucccagagcccacuuuuuuuucuuuuuuugaaauaaaauagccugucuuucagaucucaaaggcucuuuucagagccaccaaaaaaaaaaaaaaaaaaaaaaaaaaaaaaaaaaaaaaaaaaaaaaaaaaaaaaaaaaaaaaaaaaaaaaaaaaaaaaaaaaaaaaaaaaaaaaaaaaaaa

SEQ ID NO: 1198 - RNA, 1319 nt, Artificial Sequence
  mRNA product Design a-1 (hSL-A100) comprising derived and/or modified sequence from RVA/BE1058/P[4]__AEX30665.1__LumSynt_P2_VP8*(65-223) (opt1)
aggagagucccgcagucggcguccagcggcucugcuuguucgugugugugucguugcaggccuuauucaagcuuaccaugcagaucuacgagggcaagcugaccgccgaggggcuccgcuucggcaucguggccagccgguucaaccacgcgcuggucgaccgccugguggagggggccaucgacgccaucgugcggcacggcgggcgcgaggaggacaucacccucguccgggugcccggcuccugggagaucccgguggccgccggcgagcuggcccgcaaggaggacaucgacgcggucaucgccaucggggugcugauccggggcgccacgccccacuucgacuacaucgccagcgagguguccaaggggcucgcggaccugagccuggagcuccgcaagcccaucaccuucggcgucaucaccgccgacacccuggagcaggccaucgagcgggccgggacgaagcacggcaacaagggcugggaggccgcgcuguccgccaucgagauggccaaccucuucaagagccugcgcggcgggagcggcggguccggcgggagcggcggcuccgggggcgggcaguacaucaaggccaacagcaaguucaucggcaucaccgagcugggcagcggguccggccucgacggccccuaccagcccacgaccuucaagccgcccaacgacuacuggcugcugaucuccagcaacaccgacgggguggucuacgaguccaccaacaacagcgacuucuggacggccgugaucgccguggagccccacgucaaccagaccaaccgccaguacgugcuguucggcgagaacaagcaguucaacaucgagaacuccagcgacaaguggaaguucuucgagauguucaagggcaacucccagagcgacuucuccaaccggcgcacccugaccagcuccaaccggcugguggggaugcucaaguacggcgggcgcgucuggacguuccacggcgagaccccgcgggccaccaccgacagcuccagcacggccgaccugaacaacaucuccaucaucauccacagcgaguucuacaucaucccccgcagccaggaguccaagugcaacgaguacaucaacaacgggcugugaggacuagucccuguucccagagcccacuuuuuuuucuuuuuuugaaauaaaauagccugucuuucagaucucaaaggcucuuuucagagccaccaaaaaaaaaaaaaaaaaaaaaaaaaaaaaaaaaaaaaaaaaaaaaaaaaaaaaaaaaaaaaaaaaaaaaaaaaaaaaaaaaaaaaaaaaaaaaaaaaaaaa

SEQ ID NO: 1199 - RNA, 1319 nt, Artificial Sequence
  mRNA product Design a-1 (hSL-A100) comprising derived and/or modified sequence from RVA/DS-1/P[4]__CAD62680.1__LumSynt_P2_VP8*(65-223) (opt1)
aggagagucccgcagucggcguccagcggcucugcuuguucgugugugugucguugcaggccuuauucaagcuuaccaugcagaucuacgagggcaagcugaccgccgaggggcuccgcuucggcaucguggccagccgguucaaccacgcgcuggucgaccgccugguggagggggccaucgacgccaucgugcggcacggcgggcgcgaggaggacaucacccucguccgggugcccggcuccugggagaucccgguggccgccggcgagcuggcccgcaaggaggacaucgacgcggucaucgccaucggggugcugauccggggcgccacgccccacuucgacuacaucgccagcgagguguccaaggggcucgcggaccugagccuggagcuccgcaagcccaucaccuucggcgucaucaccgccgacacccuggagcaggccaucgagcgggccgggacgaagcacggcaacaagggcugggaggccgcgcuguccgccaucgagauggccaaccucuucaagagccugcgcggcgggagcggcggguccggcgggagcggcggcuccgggggcgggcaguacaucaaggccaacagcaaguucaucggcaucaccgagcugggcagcggguccggccucgacgggcccuaccagccgacgaccuucaagccgcccaacgacuacuggcugcugaucuccagcaacaccaacggcguggucuacgaguccaccaacaacaacgacuucuggacggccgugagcuccguggagccccacgucagccagaccaaccgccaguacauccucuucggggagaacaagcaguucaacguggagaacaacuccgacaaguggaaguucuucgagaccuucaccggcagcucccagggcaacuucagcaaccggcgcacgcugaccuccagcaaccggcugguggggaugcucaaguacggcgggcgcgucuggaccuuccacggcgagacgccccgggccaccaccgacuccagcaacaccgccgaccugaacaacaucagcaucaucauccacuccgaguucuacaucaucccccgcagccaggaguccaagugcaacgaguacaucaacaacgggcugugaggacuagucccuguucccagagcccacuuuuuuuucuuuuuuugaaauaaaauagccugucuuucagaucucaaaggcucuuuucagagccaccaaaaaaaaaaaaaaaaaaaaaaaaaaaaaaaaaaaaaaaaaaaaaaaaaaaaaaaaaaaaaaaaaaaaaaaaaaaaaaaaaaaaaaaaaaaaaaaaaaaaa

SEQ ID NO: 1200 - RNA, 1319 nt, Artificial Sequence; identical to SEQ ID NO: 1199
  mRNA product Design a-1 (hSL-A100) comprising derived and/or modified sequence from RVA/DS-1/P[4]__ABV53252.1__LumSynt_P2_VP8*(65-223) (opt1)

SEQ ID NO: 1201 - RNA, 1319 nt, Artificial Sequence
  mRNA product Design a-1 (hSL-A100) comprising derived and/or modified sequence from RVA/F01322/P[6]__AFA51886.1__LumSynt_P2_VP8*(65-223) (opt1)
aggagagucccgcagucggcguccagcggcucugcuuguucgugugugugucguugcaggccuuauucaagcuuaccaugcagaucuacgagggcaagcugaccgccgaggggcuccgcuucggcaucguggccagccgguucaaccacgcgcuggucgaccgccugguggagggggccaucgacgccaucgugcggcacggcgggcgcgaggaggacaucacccucguccgggugcccggcuccugggagaucccgguggccgccggcgagcuggcccgcaaggaggacaucgacgcggucaucgccaucggggugcugauccggggcgccacgccccacuucgacuacaucgccagcgagguguccaaggggcucgcggaccugagccuggagcuccgcaagcccaucaccuucggcgucaucaccgccgacacccuggagcaggccaucgagcgggccgggacgaagcacggcaacaagggcugggaggccgcgcuguccgccaucgagauggccaaccucuucaagagccugcgcggcgggagcggcggguccggcgggagcggcggcuccgggggcgggcaguacaucaaggccaacagcaaguucaucggcaucaccgagcugggcagcggguccggccucgacgggcccuaccagccgaccaacuucaagccgcccaacgacuacuggauccugcugaaccccaccaaccagcagguggugcucgagggcacgaacaagaccgacaucugggucgcccugcugcucguggagccgaacgugaccaaccagagccggcaguacacccuguucggggagacgaagcagaucaccgucgagaacaacaccaacaaguggaaguucuucgagauguuccgcuccagcguguccgccgaguuccagcacaagcggacccugacgagcgacaccaagcucgccggcuucaugaaguucuacaacuccguguggaccuuccacggcgagacccccaacgccacgaccgacuacagcuccaccagcaaccuguucgaggucgagaccgugauccacguggaguucuacaucaucccccgcucccaggagagcaagugcuccgaguacaucaacacggggcugugaggacuagucccuguucccagagcccacuuuuuuuucuuuuuuugaaauaaaauagccugucuuucagaucucaaaggcucuuuucagagccaccaaaaaaaaaaaaaaaaaaaaaaaaaaaaaaaaaaaaaaaaaaaaaaaaaaaaaaaaaaaaaaaaaaaaaaaaaaaaaaaaaaaaaaaaaaaaaaaaaaaaa

SEQ ID NO: 1202 - RNA, 1319 nt, Artificial Sequence
  mRNA product Design a-1 (hSL-A100) comprising derived and/or modified sequence from RVA/1076/P[6]__AAA47337.1__LumSynt_P2_VP8*(65-223) (opt1)
aggagagucccgcagucggcguccagcggcucugcuuguucgugugugugucguugcaggccuuauucaagcuuaccaugcagaucuacgagggcaagcugaccgccgaggggcuccgcuucggcaucguggccagccgguucaaccacgcgcuggucgaccgccugguggagggggccaucgacgccaucgugcggcacggcgggcgcgaggaggacaucacccucguccgggugcccggcuccugggagaucccgguggccgccggcgagcuggcccgcaaggaggacaucgacgcggucaucgccaucggggugcugauccggggcgccacgccccacuucgacuacaucgccagcgagguguccaaggggcucgcggaccugagccuggagcuccgcaagcccaucaccuucggcgucaucaccgccgacacccuggagcaggccaucgagcgggccgggacgaagcacggcaacaagggcugggaggccgcgcuguccgccaucgagauggccaaccucuucaagagccugcgcggcgggagcggcggguccggcgggagcggcggcuccgggggcgggcaguacaucaaggccaacagcaaguucaucggcaucaccgagcugggcagcggguccggccucgacgggcccuaccagccgaccuccuucaagccgcccagcgacuacuggauccugcugaaccccaccaaccagcaggucgugcucgagggcacgaacaagaccgacaucuggguggcccugcugcucguggagcccaacgugaccaaccagucccggcaguacacccuguucggggagacgaagcagaucaccgucgagaacaacaccaacaaguggaaguucuucgagauguuccgcagcuccgugagcgccgaguuccagcacaagcggacccugacguccgacaccaagcucgccggcuuccugaaguucuacaacagcguguggaccuucuacggcgagacgccccacgccaccaccgacuacuccagcaccuccaaccugagcgaggucgagaccgcgauccacguggaguucuacaucaucccccgcucccaggagagcaagugcaacgaguacaucaacacggggcugugaggacuagucccuguucccagagcccacuuuuuuuucuuuuuuugaaauaaaauagccugucuuucagaucucaaaggcucuuuucagagccaccaaaaaaaaaaaaaaaaaaaaaaaaaaaaaaaaaaaaaaaaaaaaaaaaaaaaaaaaaaaaaaaaaaaaaaaaaaaaaaaaaaaaaaaaaaaaaaaaaaaaa

SEQ ID NO: 1203 - RNA, 1319 nt, Artificial Sequence
  mRNA product Design a-1 (hSL-A100) comprising derived and/or modified sequence from RVA/BE1128/P[8]__AEX30671.1__LumSynt_P2_VP8*(65-223) (opt1)
aggagagucccgcagucggcguccagcggcucugcuuguucgugugugugucguugcaggccuuauucaagcuuaccaugcagaucuacgagggcaagcugaccgccgaggggcuccgcuucggcaucguggccagccgguucaaccacgcgcuggucgaccgccugguggagggggccaucgacgccaucgugcggcacggcgggcgcgaggaggacaucacccucguccgggugcccggcuccugggagaucccgguggccgccggcgagcuggcccgcaaggaggacaucgacgcggucaucgccaucggggugcugauccggggcgccacgccccacuucgacuacaucgccagcgagguguccaaggggcucgcggaccugagccuggagcuccgcaagcccaucaccuucggcgucaucaccgccgacacccuggagcaggccaucgagcgggccgggacgaagcacggcaacaagggcugggaggccgcgcuguccgccaucgagauggccaaccucuucaagagccugcgcggcgggagcggcggguccggcgggagcggcggcuccgggggcgggcaguacaucaaggccaacagcaaguucaucggcaucaccgagcugggcagcggguccggccucgacggcccguaccagccgacgaccuucaccccgcccaccgacuacuggauccugaucacguccaacaccaacggggugguguacgagagcaccaacaacuccgacuucuggaccgccgucaucgccguggagccccacgugaacccggucgaccgccaguacaacguguucggcgagaacaagcaguucaacgugcggaacgacagcgacaaguggaaguuccuggagauguuccgcggcuccagccagaacgacuucuacaaccggcgcacgcucaccuccgacacccggcuggucgggauccugaaguacggcgggcgcguguggaccuuccacggcgagacgccccgggccaccaccgacagcuccaacaccgccaaccucgacgggaucagcaucacgauccacuccgaguucuacaucaucccccgcagccaggaguccaagugcaacgaguacaucaacaacggccugugaggacuagucccuguucccagagcccacuuuuuuuucuuuuuuugaaauaaaauagccugucuuucagaucucaaaggcucuuuucagagccaccaaaaaaaaaaaaaaaaaaaaaaaaaaaaaaaaaaaaaaaaaaaaaaaaaaaaaaaaaaaaaaaaaaaaaaaaaaaaaaaaaaaaaaaaaaaaaaaaaaaaa

SEQ ID NO: 1204 - RNA, 1319 nt, Artificial Sequence
  mRNA product Design a-1 (hSL-A100) comprising derived and/or modified sequence from RVA/Wa-VirWa/P[8]__ACR22783.1__LumSynt_P2_VP8*(65-223) (opt1)
aggagagucccgcagucggcguccagcggcucugcuuguucgugugugugucguugcaggccuuauucaagcuuaccaugcagaucuacgagggcaagcugaccgccgaggggcuccgcuucggcaucguggccagccgguucaaccacgcgcuggucgaccgccugguggagggggccaucgacgccaucgugcggcacggcgggcgcgaggaggacaucacccucguccgggugcccggcuccugggagaucccgguggccgccggcgagcuggcccgcaaggaggacaucgacgcggucaucgccaucggggugcugauccggggcgccacgccccacuucgacuacaucgccagcgagguguccaaggggcucgcggaccugagccuggagcuccgcaagcccaucaccuucggcgucaucaccgccgacacccuggagcaggccaucgagcgggccgggacgaagcacggcaacaagggcugggaggccgcgcuguccgccaucgagauggccaaccucuucaagagccugcgcggcgggagcggcggguccggcgggagcggcggcuccgggggcgggcaguacaucaaggccaacagcaaguucaucggcaucaccgagcugggcagcggguccggccucgacgggcccuaccagccgacgaccuucaccccgcccaacgacuacuggauccugaucaacagcaacaccaacggcgucguguacgaguccacgaacaacagcgacuucuggaccgccguggucgccaucgagccccacgugaacccgguggaccgccaguacaccaucuucggggaguccaagcaguucaacguccggaacgacagcaacaaguggaaguuccuggagauguuccgcuccagcucccagaacgaguucuacaaccggcgcacccucacgagcgacacccggcuggugggcauccugaaguacggcgggcgcguguggaccuuccacggcgagaccccgcgggccacgaccgacuccagcuccaccgccaaccucaacaacaucagcaucaccauccacuccgaguucuacaucaucccccgcagccaggagagcaagugcaacgaguacaucaacaacgggcugugaggacuagucccuguucccagagcccacuuuuuuuucuuuuuuugaaauaaaauagccugucuuucagaucucaaaggcucuuuucagagccaccaaaaaaaaaaaaaaaaaaaaaaaaaaaaaaaaaaaaaaaaaaaaaaaaaaaaaaaaaaaaaaaaaaaaaaaaaaaaaaaaaaaaaaaaaaaaaaaaaaaaa

SEQ ID NO: 1205 - RNA, 1319 nt, Artificial Sequence
  mRNA product Design a-1 (hSL-A100) comprising derived and/or modified sequence from RVA/Wa/P[8]__AAA47290.1__LumSynt_P2_VP8*(65-223) (opt1)
aggagagucccgcagucggcguccagcggcucugcuuguucgugugugugucguugcaggccuuauucaagcuuaccaugcagaucuacgagggcaagcugaccgccgaggggcuccgcuucggcaucguggccagccgguucaaccacgcgcuggucgaccgccugguggagggggccaucgacgccaucgugcggcacggcgggcgcgaggaggacaucacccucguccgggugcccggcuccugggagaucccgguggccgccggcgagcuggcccgcaaggaggacaucgacgcggucaucgccaucggggugcugauccggggcgccacgccccacuucgacuacaucgccagcgagguguccaaggggcucgcggaccugagccuggagcuccgcaagcccaucaccuucggcgucaucaccgccgacacccuggagcaggccaucgagcgggccgggacgaagcacggcaacaagggcugggaggccgcgcuguccgccaucgagauggccaaccucuucaagagccugcgcggcgggagcggcggguccggcgggagcggcggcuccgggggcgggcaguacaucaaggccaacagcaaguucaucggcaucaccgagcugggcagcggguccggccucgacgggcccuaccagccgacgaccuucaccccgcccaacgacuacuggauccugaucaacagcaacaccaacggcgucguguacgaguccacgaacaacagcgacuucuggaccgccguggucgccaucgagccccacgugaaccccguggaccgccaguacaccaucuucggggaguccaagcaguucaacgucagcaacgacuccaacaaguggaaguuccuggagauguuccggagcuccagccagaacgaguucuacaaccgccggacccucacguccgacacccgcuucgugggcauccugaaguacggcgggcggguguggaccuuccacggcgagacgccccgcgccaccaccgacagcuccagcaccgccaaccugaacaacaucuccaucaccauccacagcgaguucuacaucaucccccggagccaggaguccaagugcaacgaguacaucaacaacgggcugugaggacuagucccuguucccagagcccacuuuuuuuucuuuuuuugaaauaaaauagccugucuuucagaucucaaaggcucuuuucagagccaccaaaaaaaaaaaaaaaaaaaaaaaaaaaaaaaaaaaaaaaaaaaaaaaaaaaaaaaaaaaaaaaaaaaaaaaaaaaaaaaaaaaaaaaaaaaaaaaaaaaaa

SEQ ID NO: 1206 - RNA, 1319 nt, Artificial Sequence; identical to SEQ ID NO: 1205
  mRNA product Design a-1 (hSL-A100) comprising derived and/or modified sequence from RVA/Wa/P[8]__AAA66953.1__LumSynt_P2_VP8*(65-223) (opt1)

SEQ ID NO: 1207 - RNA, 1391 nt, Artificial Sequence
  mRNA product Design a-1 (hSL-A100) comprising derived and/or modified sequence from RVA/BE1058/P[4]__AEX30665.1__LumSynt_P2_VP8*(41-223) (opt1)
aggagagucccgcagucggcguccagcggcucugcuuguucgugugugugucguugcaggccuuauucaagcuuaccaugcagaucuacgagggcaagcugaccgccgaggggcuccgcuucggcaucguggccagccgguucaaccacgcgcuggucgaccgccugguggagggggccaucgacgccaucgugcggcacggcgggcgcgaggaggacaucacccucguccgggugcccggcuccugggagaucccgguggccgccggcgagcuggcccgcaaggaggacaucgacgcggucaucgccaucggggugcugauccggggcgccacgccccacuucgacuacaucgccagcgagguguccaaggggcucgcggaccugagccuggagcuccgcaagcccaucaccuucggcgucaucaccgccgacacccuggagcaggccaucgagcgggccgggacgaagcacggcaacaagggcugggaggccgcgcuguccgccaucgagauggccaaccucuucaagagccugcgcggcgggagcggcggguccggcgggagcggcggcuccgggggcgggcaguacaucaaggccaacagcaaguucaucggcaucaccgagcugggcagcggguccggcgcccagacccgguacgcgcccgugaacuggggccacggggagaucaacgacagcaccaccgucgagcccgugcucgacggccccuaccagcccacgaccuucaagccgcccaacgacuacuggcugcugaucuccagcaacaccgacgggguggucuacgaguccaccaacaacagcgacuucuggacggccgugaucgccguggagccccacgucaaccagaccaaccgccaguacgugcuguucggcgagaacaagcaguucaacaucgagaacuccagcgacaaguggaaguucuucgagauguucaagggcaacucccagagcgacuucuccaaccggcgcacccugaccagcuccaaccggcugguggggaugcucaaguacggcgggcgcgucuggacguuccacggcgagaccccgcgggccaccaccgacagcuccagcacggccgaccugaacaacaucuccaucaucauccacagcgaguucuacaucaucccccgcagccaggaguccaagugcaacgaguacaucaacaacgggcugugaggacuagucccuguucccagagcccacuuuuuuuucuuuuuuugaaauaaaauagccugucuuucagaucucaaaggcucuuuucagagccaccaaaaaaaaaaaaaaaaaaaaaaaaaaaaaaaaaaaaaaaaaaaaaaaaaaaaaaaaaaaaaaaaaaaaaaaaaaaaaaaaaaaaaaaaaaaaaaaaaaaaa

SEQ ID NO: 1208 - RNA, 1391 nt, Artificial Sequence
  mRNA product Design a-1 (hSL-A100) comprising derived and/or modified sequence from RVA/DS-1/P[4]__CAD62680.1__LumSynt_P2_VP8*(41-223) (opt1)
aggagagucccgcagucggcguccagcggcucugcuuguucgugugugugucguugcaggccuuauucaagcuuaccaugcagaucuacgagggcaagcugaccgccgaggggcuccgcuucggcaucguggccagccgguucaaccacgcgcuggucgaccgccugguggagggggccaucgacgccaucgugcggcacggcgggcgcgaggaggacaucacccucguccgggugcccggcuccugggagaucccgguggccgccggcgagcuggcccgcaaggaggacaucgacgcggucaucgccaucggggugcugauccggggcgccacgccccacuucgacuacaucgccagcgagguguccaaggggcucgcggaccugagccuggagcuccgcaagcccaucaccuucggcgucaucaccgccgacacccuggagcaggccaucgagcgggccgggacgaagcacggcaacaagggcugggaggccgcgcuguccgccaucgagauggccaaccucuucaagagccugcgcggcgggagcggcggguccggcgggagcggcggcuccgggggcgggcaguacaucaaggccaacagcaaguucaucggcaucaccgagcugggcagcggguccggcgcccagacccgguacgcgcccgugaacuggggcuccugggagaucaacgacagcaccaccgucgagcccgugcucgacgggcccuaccagccgacgaccuucaagccgcccaacgacuacuggcugcugaucuccagcaacaccaacggcguggucuacgaguccaccaacaacaacgacuucuggacggccgugagcuccguggagccccacgucagccagaccaaccgccaguacauccucuucggggagaacaagcaguucaacguggagaacaacuccgacaaguggaaguucuucgagaccuucaccggcagcucccagggcaacuucagcaaccggcgcacgcugaccuccagcaaccggcugguggggaugcucaaguacggcgggcgcgucuggaccuuccacggcgagacgccccgggccaccaccgacuccagcaacaccgccgaccugaacaacaucagcaucaucauccacuccgaguucuacaucaucccccgcagccaggaguccaagugcaacgaguacaucaacaacgggcugugaggacuagucccuguucccagagcccacuuuuuuuucuuuuuuugaaauaaaauagccugucuuucagaucucaaaggcucuuuucagagccaccaaaaaaaaaaaaaaaaaaaaaaaaaaaaaaaaaaaaaaaaaaaaaaaaaaaaaaaaaaaaaaaaaaaaaaaaaaaaaaaaaaaaaaaaaaaaaaaaaaaaa

SEQ ID NO: 1209 - RNA, 1391 nt, Artificial Sequence; identical to SEQ ID NO: 1208
  mRNA product Design a-1 (hSL-A100) comprising derived and/or modified sequence from RVA/DS-1/P[4]__ABV53252.1__LumSynt_P2_VP8*(41-223) (opt1)

SEQ ID NO: 1210 - RNA, 1391 nt, Artificial Sequence
  mRNA product Design a-1 (hSL-A100) comprising derived and/or modified sequence from RVA/F01322/P[6]__AFA51886.1__LumSynt_P2_VP8*(41-223) (opt1)
aggagagucccgcagucggcguccagcggcucugcuuguucgugugugugucguugcaggccuuauucaagcuuaccaugcagaucuacgagggcaagcugaccgccgaggggcuccgcuucggcaucguggccagccgguucaaccacgcgcuggucgaccgccugguggagggggccaucgacgccaucgugcggcacggcgggcgcgaggaggacaucacccucguccgggugcccggcuccugggagaucccgguggccgccggcgagcuggcccgcaaggaggacaucgacgcggucaucgccaucggggugcugauccggggcgccacgccccacuucgacuacaucgccagcgagguguccaaggggcucgcggaccugagccuggagcuccgcaagcccaucaccuucggcgucaucaccgccgacacccuggagcaggccaucgagcgggccgggacgaagcacggcaacaagggcugggaggccgcgcuguccgccaucgagauggccaaccucuucaagagccugcgcggcgggagcggcggguccggcgggagcggcggcuccgggggcgggcaguacaucaaggccaacagcaaguucaucggcaucaccgagcugggcagcggguccggcgcccagaccaacuacgcgcccgugaccuggagccacggcgaggugaacgacuccacgaccaucgagcccguccucgacgggcccuaccagccgaccaacuucaagccgcccaacgacuacuggauccugcugaaccccaccaaccagcagguggugcucgagggcacgaacaagaccgacaucugggucgcccugcugcucguggagccgaacgugaccaaccagagccggcaguacacccuguucggggagacgaagcagaucaccgucgagaacaacaccaacaaguggaaguucuucgagauguuccgcuccagcguguccgccgaguuccagcacaagcggacccugacgagcgacaccaagcucgccggcuucaugaaguucuacaacuccguguggaccuuccacggcgagacccccaacgccacgaccgacuacagcuccaccagcaaccuguucgaggucgagaccgugauccacguggaguucuacaucaucccccgcucccaggagagcaagugcuccgaguacaucaacacggggcugugaggacuagucccuguucccagagcccacuuuuuuuucuuuuuuugaaauaaaauagccugucuuucagaucucaaaggcucuuuucagagccaccaaaaaaaaaaaaaaaaaaaaaaaaaaaaaaaaaaaaaaaaaaaaaaaaaaaaaaaaaaaaaaaaaaaaaaaaaaaaaaaaaaaaaaaaaaaaaaaaaaaaa

SEQ ID NO: 1211 - RNA, 1391 nt, Artificial Sequence
  mRNA product Design a-1 (hSL-A100) comprising derived and/or modified sequence from RVA/1076/P[6]__AAA47337.1__LumSynt_P2_VP8*(41-223) (opt1)
aggagagucccgcagucggcguccagcggcucugcuuguucgugugugugucguugcaggccuuauucaagcuuaccaugcagaucuacgagggcaagcugaccgccgaggggcuccgcuucggcaucguggccagccgguucaaccacgcgcuggucgaccgccugguggagggggccaucgacgccaucgugcggcacggcgggcgcgaggaggacaucacccucguccgggugcccggcuccugggagaucccgguggccgccggcgagcuggcccgcaaggaggacaucgacgcggucaucgccaucggggugcugauccggggcgccacgccccacuucgacuacaucgccagcgagguguccaaggggcucgcggaccugagccuggagcuccgcaagcccaucaccuucggcgucaucaccgccgacacccuggagcaggccaucgagcgggccgggacgaagcacggcaacaagggcugggaggccgcgcuguccgccaucgagauggccaaccucuucaagagccugcgcggcgggagcggcggguccggcgggagcggcggcuccgggggcgggcaguacaucaaggccaacagcaaguucaucggcaucaccgagcugggcagcggguccggcgcccagaccaacuacgcgcccgugaccuggagccacggcgaggugaacgacagcacgaccaucgagcccguccucgacgggcccuaccagccgaccuccuucaagccgcccagcgacuacuggauccugcugaaccccaccaaccagcaggucgugcucgagggcacgaacaagaccgacaucuggguggcccugcugcucguggagcccaacgugaccaaccagucccggcaguacacccuguucggggagacgaagcagaucaccgucgagaacaacaccaacaaguggaaguucuucgagauguuccgcagcuccgugagcgccgaguuccagcacaagcggacccugacguccgacaccaagcucgccggcuuccugaaguucuacaacagcguguggaccuucuacggcgagacgccccacgccaccaccgacuacuccagcaccuccaaccugagcgaggucgagaccgcgauccacguggaguucuacaucaucccccgcucccaggagagcaagugcaacgaguacaucaacacggggcugugaggacuagucccuguucccagagcccacuuuuuuuucuuuuuuugaaauaaaauagccugucuuucagaucucaaaggcucuuuucagagccaccaaaaaaaaaaaaaaaaaaaaaaaaaaaaaaaaaaaaaaaaaaaaaaaaaaaaaaaaaaaaaaaaaaaaaaaaaaaaaaaaaaaaaaaaaaaaaaaaaaaaa

SEQ ID NO: 1212 - RNA, 1391 nt, Artificial Sequence
  mRNA product Design a-1 (hSL-A100) comprising derived and/or modified sequence from RVA/BE1128/P[8]__AEX30671.1__LumSynt_P2_VP8*(41-223) (opt1) R8578
aggagagucccgcagucggcguccagcggcucugcuuguucgugugugugucguugcaggccuuauucaagcuuaccaugcagaucuacgagggcaagcugaccgccgaggggcuccgcuucggcaucguggccagccgguucaaccacgcgcuggucgaccgccugguggagggggccaucgacgccaucgugcggcacggcgggcgcgaggaggacaucacccucguccgggugcccggcuccugggagaucccgguggccgccggcgagcuggcccgcaaggaggacaucgacgcggucaucgccaucggggugcugauccggggcgccacgccccacuucgacuacaucgccagcgagguguccaaggggcucgcggaccugagccuggagcuccgcaagcccaucaccuucggcgucaucaccgccgacacccuggagcaggccaucgagcgggccgggacgaagcacggcaacaagggcugggaggccgcgcuguccgccaucgagauggccaaccucuucaagagccugcgcggcgggagcggcggguccggcgggagcggcggcuccgggggcgggcaguacaucaaggccaacagcaaguucaucggcaucaccgagcugggcagcggguccggcgcccagacccgguacgcgcccgugaacuggggccacggggagaucaacgacagcaccaccgucgagcccauccucgacggcccguaccagccgacgaccuucaccccgcccaccgacuacuggauccugaucacguccaacaccaacggggugguguacgagagcaccaacaacuccgacuucuggaccgccgucaucgccguggagccccacgugaacccggucgaccgccaguacaacguguucggcgagaacaagcaguucaacgugcggaacgacagcgacaaguggaaguuccuggagauguuccgcggcuccagccagaacgacuucuacaaccggcgcacgcucaccuccgacacccggcuggucgggauccugaaguacggcgggcgcguguggaccuuccacggcgagacgccccgggccaccaccgacagcuccaacaccgccaaccucgacgggaucagcaucacgauccacuccgaguucuacaucaucccccgcagccaggaguccaagugcaacgaguacaucaacaacggccugugaggacuagucccuguucccagagcccacuuuuuuuucuuuuuuugaaauaaaauagccugucuuucagaucucaaaggcucuuuucagagccaccaaaaaaaaaaaaaaaaaaaaaaaaaaaaaaaaaaaaaaaaaaaaaaaaaaaaaaaaaaaaaaaaaaaaaaaaaaaaaaaaaaaaaaaaaaaaaaaaaaaaa

SEQ ID NO: 1213 - RNA, 1391 nt, Artificial Sequence
  mRNA product Design a-1 (hSL-A100) comprising derived and/or modified sequence from RVA/Wa-VirWa/P[8]__ACR22783.1__LumSynt_P2_VP8*(41-223) (opt1)
aggagagucccgcagucggcguccagcggcucugcuuguucgugugugugucguugcaggccuuauucaagcuuaccaugcagaucuacgagggcaagcugaccgccgaggggcuccgcuucggcaucguggccagccgguucaaccacgcgcuggucgaccgccugguggagggggccaucgacgccaucgugcggcacggcgggcgcgaggaggacaucacccucguccgggugcccggcuccugggagaucccgguggccgccggcgagcuggcccgcaaggaggacaucgacgcggucaucgccaucggggugcugauccggggcgccacgccccacuucgacuacaucgccagcgagguguccaaggggcucgcggaccugagccuggagcuccgcaagcccaucaccuucggcgucaucaccgccgacacccuggagcaggccaucgagcgggccgggacgaagcacggcaacaagggcugggaggccgcgcuguccgccaucgagauggccaaccucuucaagagccugcgcggcgggagcggcggguccggcgggagcggcggcuccgggggcgggcaguacaucaaggccaacagcaaguucaucggcaucaccgagcugggcagcggguccggcgcccagacccgguacgcgcccgugaacugggggcacggcgagaucaacgacuccaccaccguggagcccauccucgacgggcccuaccagccgacgaccuucaccccgcccaacgacuacuggauccugaucaacagcaacaccaacggcgucguguacgaguccacgaacaacagcgacuucuggaccgccguggucgccaucgagccccacgugaacccgguggaccgccaguacaccaucuucggggaguccaagcaguucaacguccggaacgacagcaacaaguggaaguuccuggagauguuccgcuccagcucccagaacgaguucuacaaccggcgcacccucacgagcgacacccggcuggugggcauccugaaguacggcgggcgcguguggaccuuccacggcgagaccccgcgggccacgaccgacuccagcuccaccgccaaccucaacaacaucagcaucaccauccacuccgaguucuacaucaucccccgcagccaggagagcaagugcaacgaguacaucaacaacgggcugugaggacuagucccuguucccagagcccacuuuuuuuucuuuuuuugaaauaaaauagccugucuuucagaucucaaaggcucuuuucagagccaccaaaaaaaaaaaaaaaaaaaaaaaaaaaaaaaaaaaaaaaaaaaaaaaaaaaaaaaaaaaaaaaaaaaaaaaaaaaaaaaaaaaaaaaaaaaaaaaaaaaaa

SEQ ID NO: 1214 - RNA, 1391 nt, Artificial Sequence
  mRNA product Design a-1 (hSL-A100) comprising derived and/or modified sequence from RVA/Wa/P[8]__AAA47290.1__LumSynt_P2_VP8*(41-223) (opt1)
aggagagucccgcagucggcguccagcggcucugcuuguucgugugugugucguugcaggccuuauucaagcuuaccaugcagaucuacgagggcaagcugaccgccgaggggcuccgcuucggcaucguggccagccgguucaaccacgcgcuggucgaccgccugguggagggggccaucgacgccaucgugcggcacggcgggcgcgaggaggacaucacccucguccgggugcccggcuccugggagaucccgguggccgccggcgagcuggcccgcaaggaggacaucgacgcggucaucgccaucggggugcugauccggggcgccacgccccacuucgacuacaucgccagcgagguguccaaggggcucgcggaccugagccuggagcuccgcaagcccaucaccuucggcgucaucaccgccgacacccuggagcaggccaucgagcgggccgggacgaagcacggcaacaagggcugggaggccgcgcuguccgccaucgagauggccaaccucuucaagagccugcgcggcgggagcggcggguccggcgggagcggcggcuccgggggcgggcaguacaucaaggccaacagcaaguucaucggcaucaccgagcugggcagcggguccggcgcccagacccgguacgcgcccgugaacugggggcacggcgagaucaacgacuccaccaccguggagcccauccucgacgggcccuaccagccgacgaccuucaccccgcccaacgacuacuggauccugaucaacagcaacaccaacggcgucguguacgaguccacgaacaacagcgacuucuggaccgccguggucgccaucgagccccacgugaaccccguggaccgccaguacaccaucuucggggaguccaagcaguucaacgucagcaacgacuccaacaaguggaaguuccuggagauguuccggagcuccagccagaacgaguucuacaaccgccggacccucacguccgacacccgcuucgugggcauccugaaguacggcgggcggguguggaccuuccacggcgagacgccccgcgccaccaccgacagcuccagcaccgccaaccugaacaacaucuccaucaccauccacagcgaguucuacaucaucccccggagccaggaguccaagugcaacgaguacaucaacaacgggcugugaggacuagucccuguucccagagcccacuuuuuuuucuuuuuuugaaauaaaauagccugucuuucagaucucaaaggcucuuuucagagccaccaaaaaaaaaaaaaaaaaaaaaaaaaaaaaaaaaaaaaaaaaaaaaaaaaaaaaaaaaaaaaaaaaaaaaaaaaaaaaaaaaaaaaaaaaaaaaaaaaaaaa

SEQ ID NO: 1215 - RNA, 1391 nt, Artificial Sequence
  mRNA product Design a-1 (hSL-A100) comprising derived and/or modified sequence from RVA/Wa/P[8]__AAA66953.1__LumSynt_P2_VP8*(41-223) (opt1)
aggagagucccgcagucggcguccagcggcucugcuuguucgugugugugucguugcaggccuuauucaagcuuaccaugcagaucuacgagggcaagcugaccgccgaggggcuccgcuucggcaucguggccagccgguucaaccacgcgcuggucgaccgccugguggagggggccaucgacgccaucgugcggcacggcgggcgcgaggaggacaucacccucguccgggugcccggcuccugggagaucccgguggccgccggcgagcuggcccgcaaggaggacaucgacgcggucaucgccaucggggugcugauccggggcgccacgccccacuucgacuacaucgccagcgagguguccaaggggcucgcggaccugagccuggagcuccgcaagcccaucaccuucggcgucaucaccgccgacacccuggagcaggccaucgagcgggccgggacgaagcacggcaacaagggcugggaggccgcgcuguccgccaucgagauggccaaccucuucaagagccugcgcggcgggagcggcggguccggcgggagcggcggcuccgggggcgggcaguacaucaaggccaacagcaaguucaucggcaucaccgagcugggcagcggguccggcgcccagacccgguacgcgcccgugaacugggggcacggcgagaucaacgacuccaccaccguggagcccaugcucgacgggcccuaccagccgacgaccuucaccccgcccaacgacuacuggauccugaucaacagcaacaccaacggcgucguguacgaguccacgaacaacagcgacuucuggaccgccguggucgccaucgagccccacgugaaccccguggaccgccaguacaccaucuucggggaguccaagcaguucaacgucagcaacgacuccaacaaguggaaguuccuggagauguuccggagcuccagccagaacgaguucuacaaccgccggacccucacguccgacacccgcuucgugggcauccugaaguacggcgggcggguguggaccuuccacggcgagacgccccgcgccaccaccgacagcuccagcaccgccaaccugaacaacaucuccaucaccauccacagcgaguucuacaucaucccccggagccaggaguccaagugcaacgaguacaucaacaacgggcugugaggacuagucccuguucccagagcccacuuuuuuuucuuuuuuugaaauaaaauagccugucuuucagaucucaaaggcucuuuucagagccaccaaaaaaaaaaaaaaaaaaaaaaaaaaaaaaaaaaaaaaaaaaaaaaaaaaaaaaaaaaaaaaaaaaaaaaaaaaaaaaaaaaaaaaaaaaaaaaaaaaaaa

SEQ ID NO: 1216 - RNA, 866 nt, Artificial Sequence
  mRNA product Design a-1 (hSL-A100) comprising derived and/or modified sequence from RVA/BE1058/P[4]__AEX30665.1__SP-IgE_P2_VP8*(65-223) (opt1)
aggagagucccgcagucggcguccagcggcucugcuuguucgugugugugucguugcaggccuuauucaagcuuaccauggacuggaccuggauccuguuccucguggccgccgcgacccgcguccacagccaguacaucaaggccaacagcaaguucaucggcaucaccgagcugggcagcggguccggccucgacggccccuaccagcccacgaccuucaagccgcccaacgacuacuggcugcugaucuccagcaacaccgacgggguggucuacgaguccaccaacaacagcgacuucuggacggccgugaucgccguggagccccacgucaaccagaccaaccgccaguacgugcuguucggcgagaacaagcaguucaacaucgagaacuccagcgacaaguggaaguucuucgagauguucaagggcaacucccagagcgacuucuccaaccggcgcacccugaccagcuccaaccggcugguggggaugcucaaguacggcgggcgcgucuggacguuccacggcgagaccccgcgggccaccaccgacagcuccagcacggccgaccugaacaacaucuccaucaucauccacagcgaguucuacaucaucccccgcagccaggaguccaagugcaacgaguacaucaacaacgggcugugaggacuagucccuguucccagagcccacuuuuuuuucuuuuuuugaaauaaaauagccugucuuucagaucucaaaggcucuuuucagagccaccaaaaaaaaaaaaaaaaaaaaaaaaaaaaaaaaaaaaaaaaaaaaaaaaaaaaaaaaaaaaaaaaaaaaaaaaaaaaaaaaaaaaaaaaaaaaaaaaaaaaa

SEQ ID NO: 1217 - RNA, 866 nt, Artificial Sequence
  mRNA product Design a-1 (hSL-A100) comprising derived and/or modified sequence from RVA/DS-1/P[4]__CAD62680.1__SP-IgE_P2_VP8*(65-223) (opt1)
aggagagucccgcagucggcguccagcggcucugcuuguucgugugugugucguugcaggccuuauucaagcuuaccauggacuggaccuggauccuguuccucguggccgccgcgacccgcguccacagccaguacaucaaggccaacagcaaguucaucggcaucaccgagcugggcagcggguccggccucgacgggcccuaccagccgacgaccuucaagccgcccaacgacuacuggcugcugaucuccagcaacaccaacggcguggucuacgaguccaccaacaacaacgacuucuggacggccgugagcuccguggagccccacgucagccagaccaaccgccaguacauccucuucggggagaacaagcaguucaacguggagaacaacuccgacaaguggaaguucuucgagaccuucaccggcagcucccagggcaacuucagcaaccggcgcacgcugaccuccagcaaccggcugguggggaugcucaaguacggcgggcgcgucuggaccuuccacggcgagacgccccgggccaccaccgacuccagcaacaccgccgaccugaacaacaucagcaucaucauccacuccgaguucuacaucaucccccgcagccaggaguccaagugcaacgaguacaucaacaacgggcugugaggacuagucccuguucccagagcccacuuuuuuuucuuuuuuugaaauaaaauagccugucuuucagaucucaaaggcucuuuucagagccaccaaaaaaaaaaaaaaaaaaaaaaaaaaaaaaaaaaaaaaaaaaaaaaaaaaaaaaaaaaaaaaaaaaaaaaaaaaaaaaaaaaaaaaaaaaaaaaaaaaaaa

SEQ ID NO: 1218 - RNA, 866 nt, Artificial Sequence; identical to SEQ ID NO: 1217
  mRNA product Design a-1 (hSL-A100) comprising derived and/or modified sequence from RVA/DS-1/P[4]__ABV53252.1__SP-IgE_P2_VP8*(65-223) (opt1)

SEQ ID NO: 1219 - RNA, 866 nt, Artificial Sequence
  mRNA product Design a-1 (hSL-A100) comprising derived and/or modified sequence from RVA/F01322/P[6]__AFA51886.1__SP-IgE_P2_VP8*(65-223) (opt1)
aggagagucccgcagucggcguccagcggcucugcuuguucgugugugugucguugcaggccuuauucaagcuuaccauggacuggaccuggauccuguuccucguggccgccgcgacccgcguccacagccaguacaucaaggccaacagcaaguucaucggcaucaccgagcugggcagcggguccggccucgacgggcccuaccagccgaccaacuucaagccgcccaacgacuacuggauccugcugaaccccaccaaccagcagguggugcucgagggcacgaacaagaccgacaucugggucgcccugcugcucguggagccgaacgugaccaaccagagccggcaguacacccuguucggggagacgaagcagaucaccgucgagaacaacaccaacaaguggaaguucuucgagauguuccgcuccagcguguccgccgaguuccagcacaagcggacccugacgagcgacaccaagcucgccggcuucaugaaguucuacaacuccguguggaccuuccacggcgagacccccaacgccacgaccgacuacagcuccaccagcaaccuguucgaggucgagaccgugauccacguggaguucuacaucaucccccgcucccaggagagcaagugcuccgaguacaucaacacggggcugugaggacuagucccuguucccagagcccacuuuuuuuucuuuuuuugaaauaaaauagccugucuuucagaucucaaaggcucuuuucagagccaccaaaaaaaaaaaaaaaaaaaaaaaaaaaaaaaaaaaaaaaaaaaaaaaaaaaaaaaaaaaaaaaaaaaaaaaaaaaaaaaaaaaaaaaaaaaaaaaaaaaaa

SEQ ID NO: 1220 - RNA, 866 nt, Artificial Sequence
  mRNA product Design a-1 (hSL-A100) comprising derived and/or modified sequence from RVA/1076/P[6]__AAA47337.1__SP-IgE_P2_VP8*(65-223) (opt1)
aggagagucccgcagucggcguccagcggcucugcuuguucgugugugugucguugcaggccuuauucaagcuuaccauggacuggaccuggauccuguuccucguggccgccgcgacccgcguccacagccaguacaucaaggccaacagcaaguucaucggcaucaccgagcugggcagcggguccggccucgacgggcccuaccagccgaccuccuucaagccgcccagcgacuacuggauccugcugaaccccaccaaccagcaggucgugcucgagggcacgaacaagaccgacaucuggguggcccugcugcucguggagcccaacgugaccaaccagucccggcaguacacccuguucggggagacgaagcagaucaccgucgagaacaacaccaacaaguggaaguucuucgagauguuccgcagcuccgugagcgccgaguuccagcacaagcggacccugacguccgacaccaagcucgccggcuuccugaaguucuacaacagcguguggaccuucuacggcgagacgccccacgccaccaccgacuacuccagcaccuccaaccugagcgaggucgagaccgcgauccacguggaguucuacaucaucccccgcucccaggagagcaagugcaacgaguacaucaacacggggcugugaggacuagucccuguucccagagcccacuuuuuuuucuuuuuuugaaauaaaauagccugucuuucagaucucaaaggcucuuuucagagccaccaaaaaaaaaaaaaaaaaaaaaaaaaaaaaaaaaaaaaaaaaaaaaaaaaaaaaaaaaaaaaaaaaaaaaaaaaaaaaaaaaaaaaaaaaaaaaaaaaaaaa

SEQ ID NO: 1221 - RNA, 866 nt, Artificial Sequence
  mRNA product Design a-1 (hSL-A100) comprising derived and/or modified sequence from RVA/BE1128/P[8]__AEX30671.1__SP-IgE_P2_VP8*(65-223) (opt1)
aggagagucccgcagucggcguccagcggcucugcuuguucgugugugugucguugcaggccuuauucaagcuuaccauggacuggaccuggauccuguuccucguggccgccgcgacccgcguccacagccaguacaucaaggccaacagcaaguucaucggcaucaccgagcugggcagcggguccggccucgacggcccguaccagccgacgaccuucaccccgcccaccgacuacuggauccugaucacguccaacaccaacggggugguguacgagagcaccaacaacuccgacuucuggaccgccgucaucgccguggagccccacgugaacccggucgaccgccaguacaacguguucggcgagaacaagcaguucaacgugcggaacgacagcgacaaguggaaguuccuggagauguuccgcggcuccagccagaacgacuucuacaaccggcgcacgcucaccuccgacacccggcuggucgggauccugaaguacggcgggcgcguguggaccuuccacggcgagacgccccgggccaccaccgacagcuccaacaccgccaaccucgacgggaucagcaucacgauccacuccgaguucuacaucaucccccgcagccaggaguccaagugcaacgaguacaucaacaacggccugugaggacuagucccuguucccagagcccacuuuuuuuucuuuuuuugaaauaaaauagccugucuuucagaucucaaaggcucuuuucagagccaccaaaaaaaaaaaaaaaaaaaaaaaaaaaaaaaaaaaaaaaaaaaaaaaaaaaaaaaaaaaaaaaaaaaaaaaaaaaaaaaaaaaaaaaaaaaaaaaaaaaaa

SEQ ID NO: 1222 - RNA, 866 nt, Artificial Sequence
  mRNA product Design a-1 (hSL-A100) comprising derived and/or modified sequence from RVA/Wa-VirWa/P[8]__ACR22783.1__SP-IgE_P2_VP8*(65-223) (opt1)
aggagagucccgcagucggcguccagcggcucugcuuguucgugugugugucguugcaggccuuauucaagcuuaccauggacuggaccuggauccuguuccucguggccgccgcgacccgcguccacagccaguacaucaaggccaacagcaaguucaucggcaucaccgagcugggcagcggguccggccucgacgggcccuaccagccgacgaccuucaccccgcccaacgacuacuggauccugaucaacagcaacaccaacggcgucguguacgaguccacgaacaacagcgacuucuggaccgccguggucgccaucgagccccacgugaacccgguggaccgccaguacaccaucuucggggaguccaagcaguucaacguccggaacgacagcaacaaguggaaguuccuggagauguuccgcuccagcucccagaacgaguucuacaaccggcgcacccucacgagcgacacccggcuggugggcauccugaaguacggcgggcgcguguggaccuuccacggcgagaccccgcgggccacgaccgacuccagcuccaccgccaaccucaacaacaucagcaucaccauccacuccgaguucuacaucaucccccgcagccaggagagcaagugcaacgaguacaucaacaacgggcugugaggacuagucccuguucccagagcccacuuuuuuuucuuuuuuugaaauaaaauagccugucuuucagaucucaaaggcucuuuucagagccaccaaaaaaaaaaaaaaaaaaaaaaaaaaaaaaaaaaaaaaaaaaaaaaaaaaaaaaaaaaaaaaaaaaaaaaaaaaaaaaaaaaaaaaaaaaaaaaaaaaaaa

SEQ ID NO: 1223 - RNA, 866 nt, Artificial Sequence
  mRNA product Design a-1 (hSL-A100) comprising derived and/or modified sequence from RVA/Wa/P[8]__AAA47290.1__SP-IgE_P2_VP8*(65-223) (opt1)
aggagagucccgcagucggcguccagcggcucugcuuguucgugugugugucguugcaggccuuauucaagcuuaccauggacuggaccuggauccuguuccucguggccgccgcgacccgcguccacagccaguacaucaaggccaacagcaaguucaucggcaucaccgagcugggcagcggguccggccucgacgggcccuaccagccgacgaccuucaccccgcccaacgacuacuggauccugaucaacagcaacaccaacggcgucguguacgaguccacgaacaacagcgacuucuggaccgccguggucgccaucgagccccacgugaaccccguggaccgccaguacaccaucuucggggaguccaagcaguucaacgucagcaacgacuccaacaaguggaaguuccuggagauguuccggagcuccagccagaacgaguucuacaaccgccggacccucacguccgacacccgcuucgugggcauccugaaguacggcgggcggguguggaccuuccacggcgagacgccccgcgccaccaccgacagcuccagcaccgccaaccugaacaacaucuccaucaccauccacagcgaguucuacaucaucccccggagccaggaguccaagugcaacgaguacaucaacaacgggcugugaggacuagucccuguucccagagcccacuuuuuuuucuuuuuuugaaauaaaauagccugucuuucagaucucaaaggcucuuuucagagccaccaaaaaaaaaaaaaaaaaaaaaaaaaaaaaaaaaaaaaaaaaaaaaaaaaaaaaaaaaaaaaaaaaaaaaaaaaaaaaaaaaaaaaaaaaaaaaaaaaaaaa

SEQ ID NO: 1224 - RNA, 866 nt, Artificial Sequence; identical to SEQ ID NO: 1223
  mRNA product Design a-1 (hSL-A100) comprising derived and/or modified sequence from RVA/Wa/P[8]__AAA66953.1__SP-IgE_P2_VP8*(65-223) (opt1)

SEQ ID NO: 1225 - RNA, 938 nt, Artificial Sequence
  mRNA product Design a-1 (hSL-A100) comprising derived and/or modified sequence from RVA/BE1058/P[4]__AEX30665.1__SP-IgE_P2_VP8*(41-223) (opt1)
aggagagucccgcagucggcguccagcggcucugcuuguucgugugugugucguugcaggccuuauucaagcuuaccauggacuggaccuggauccuguuccucguggccgccgcgacccgcguccacagccaguacaucaaggccaacagcaaguucaucggcaucaccgagcugggcagcggguccggcgcccagacccgguacgcgcccgugaacuggggccacggggagaucaacgacagcaccaccgucgagcccgugcucgacggccccuaccagcccacgaccuucaagccgcccaacgacuacuggcugcugaucuccagcaacaccgacgggguggucuacgaguccaccaacaacagcgacuucuggacggccgugaucgccguggagccccacgucaaccagaccaaccgccaguacgugcuguucggcgagaacaagcaguucaacaucgagaacuccagcgacaaguggaaguucuucgagauguucaagggcaacucccagagcgacuucuccaaccggcgcacccugaccagcuccaaccggcugguggggaugcucaaguacggcgggcgcgucuggacguuccacggcgagaccccgcgggccaccaccgacagcuccagcacggccgaccugaacaacaucuccaucaucauccacagcgaguucuacaucaucccccgcagccaggaguccaagugcaacgaguacaucaacaacgggcugugaggacuagucccuguucccagagcccacuuuuuuuucuuuuuuugaaauaaaauagccugucuuucagaucucaaaggcucuuuucagagccaccaaaaaaaaaaaaaaaaaaaaaaaaaaaaaaaaaaaaaaaaaaaaaaaaaaaaaaaaaaaaaaaaaaaaaaaaaaaaaaaaaaaaaaaaaaaaaaaaaaaaa

SEQ ID NO: 1226 - RNA, 938 nt, Artificial Sequence
  mRNA product Design a-1 (hSL-A100) comprising derived and/or modified sequence from RVA/DS-1/P[4]__CAD62680.1__SP-IgE_P2_VP8*(41-223) (opt1)
aggagagucccgcagucggcguccagcggcucugcuuguucgugugugugucguugcaggccuuauucaagcuuaccauggacuggaccuggauccuguuccucguggccgccgcgacccgcguccacagccaguacaucaaggccaacagcaaguucaucggcaucaccgagcugggcagcggguccggcgcccagacccgguacgcgcccgugaacuggggcuccugggagaucaacgacagcaccaccgucgagcccgugcucgacgggcccuaccagccgacgaccuucaagccgcccaacgacuacuggcugcugaucuccagcaacaccaacggcguggucuacgaguccaccaacaacaacgacuucuggacggccgugagcuccguggagccccacgucagccagaccaaccgccaguacauccucuucggggagaacaagcaguucaacguggagaacaacuccgacaaguggaaguucuucgagaccuucaccggcagcucccagggcaacuucagcaaccggcgcacgcugaccuccagcaaccggcugguggggaugcucaaguacggcgggcgcgucuggaccuuccacggcgagacgccccgggccaccaccgacuccagcaacaccgccgaccugaacaacaucagcaucaucauccacuccgaguucuacaucaucccccgcagccaggaguccaagugcaacgaguacaucaacaacgggcugugaggacuagucccuguucccagagcccacuuuuuuuucuuuuuuugaaauaaaauagccugucuuucagaucucaaaggcucuuuucagagccaccaaaaaaaaaaaaaaaaaaaaaaaaaaaaaaaaaaaaaaaaaaaaaaaaaaaaaaaaaaaaaaaaaaaaaaaaaaaaaaaaaaaaaaaaaaaaaaaaaaaaa

SEQ ID NO: 1227 - RNA, 938 nt, Artificial Sequence; identical to SEQ ID NO: 1226
  mRNA product Design a-1 (hSL-A100) comprising derived and/or modified sequence from RVA/DS-1/P[4]__ABV53252.1__SP-IgE_P2_VP8*(41-223) (opt1)

SEQ ID NO: 1228 - RNA, 938 nt, Artificial Sequence
  mRNA product Design a-1 (hSL-A100) comprising derived and/or modified sequence from RVA/F01322/P[6]__AFA51886.1__SP-IgE_P2_VP8*(41-223) (opt1)
aggagagucccgcagucggcguccagcggcucugcuuguucgugugugugucguugcaggccuuauucaagcuuaccauggacuggaccuggauccuguuccucguggccgccgcgacccgcguccacagccaguacaucaaggccaacagcaaguucaucggcaucaccgagcugggcagcggguccggcgcccagaccaacuacgcgcccgugaccuggagccacggcgaggugaacgacuccacgaccaucgagcccguccucgacgggcccuaccagccgaccaacuucaagccgcccaacgacuacuggauccugcugaaccccaccaaccagcagguggugcucgagggcacgaacaagaccgacaucugggucgcccugcugcucguggagccgaacgugaccaaccagagccggcaguacacccuguucggggagacgaagcagaucaccgucgagaacaacaccaacaaguggaaguucuucgagauguuccgcuccagcguguccgccgaguuccagcacaagcggacccugacgagcgacaccaagcucgccggcuucaugaaguucuacaacuccguguggaccuuccacggcgagacccccaacgccacgaccgacuacagcuccaccagcaaccuguucgaggucgagaccgugauccacguggaguucuacaucaucccccgcucccaggagagcaagugcuccgaguacaucaacacggggcugugaggacuagucccuguucccagagcccacuuuuuuuucuuuuuuugaaauaaaauagccugucuuucagaucucaaaggcucuuuucagagccaccaaaaaaaaaaaaaaaaaaaaaaaaaaaaaaaaaaaaaaaaaaaaaaaaaaaaaaaaaaaaaaaaaaaaaaaaaaaaaaaaaaaaaaaaaaaaaaaaaaaaa

SEQ ID NO: 1229 - RNA, 938 nt, Artificial Sequence
  mRNA product Design a-1 (hSL-A100) comprising derived and/or modified sequence from RVA/1076/P[6]__AAA47337.1__SP-IgE_P2_VP8*(41-223) (opt1)
aggagagucccgcagucggcguccagcggcucugcuuguucgugugugugucguugcaggccuuauucaagcuuaccauggacuggaccuggauccuguuccucguggccgccgcgacccgcguccacagccaguacaucaaggccaacagcaaguucaucggcaucaccgagcugggcagcggguccggcgcccagaccaacuacgcgcccgugaccuggagccacggcgaggugaacgacagcacgaccaucgagcccguccucgacgggcccuaccagccgaccuccuucaagccgcccagcgacuacuggauccugcugaaccccaccaaccagcaggucgugcucgagggcacgaacaagaccgacaucuggguggcccugcugcucguggagcccaacgugaccaaccagucccggcaguacacccuguucggggagacgaagcagaucaccgucgagaacaacaccaacaaguggaaguucuucgagauguuccgcagcuccgugagcgccgaguuccagcacaagcggacccugacguccgacaccaagcucgccggcuuccugaaguucuacaacagcguguggaccuucuacggcgagacgccccacgccaccaccgacuacuccagcaccuccaaccugagcgaggucgagaccgcgauccacguggaguucuacaucaucccccgcucccaggagagcaagugcaacgaguacaucaacacggggcugugaggacuagucccuguucccagagcccacuuuuuuuucuuuuuuugaaauaaaauagccugucuuucagaucucaaaggcucuuuucagagccaccaaaaaaaaaaaaaaaaaaaaaaaaaaaaaaaaaaaaaaaaaaaaaaaaaaaaaaaaaaaaaaaaaaaaaaaaaaaaaaaaaaaaaaaaaaaaaaaaaaaaa

SEQ ID NO: 1230 - RNA, 938 nt, Artificial Sequence
  mRNA product Design a-1 (hSL-A100) comprising derived and/or modified sequence from RVA/BE1128/P[8]__AEX30671.1__SP-IgE_P2_VP8*(41-223) (opt1) R8579
aggagagucccgcagucggcguccagcggcucugcuuguucgugugugugucguugcaggccuuauucaagcuuaccauggacuggaccuggauccuguuccucguggccgccgcgacccgcguccacagccaguacaucaaggccaacagcaaguucaucggcaucaccgagcugggcagcggguccggcgcccagacccgguacgcgcccgugaacuggggccacggggagaucaacgacagcaccaccgucgagcccauccucgacggcccguaccagccgacgaccuucaccccgcccaccgacuacuggauccugaucacguccaacaccaacggggugguguacgagagcaccaacaacuccgacuucuggaccgccgucaucgccguggagccccacgugaacccggucgaccgccaguacaacguguucggcgagaacaagcaguucaacgugcggaacgacagcgacaaguggaaguuccuggagauguuccgcggcuccagccagaacgacuucuacaaccggcgcacgcucaccuccgacacccggcuggucgggauccugaaguacggcgggcgcguguggaccuuccacggcgagacgccccgggccaccaccgacagcuccaacaccgccaaccucgacgggaucagcaucacgauccacuccgaguucuacaucaucccccgcagccaggaguccaagugcaacgaguacaucaacaacggccugugaggacuagucccuguucccagagcccacuuuuuuuucuuuuuuugaaauaaaauagccugucuuucagaucucaaaggcucuuuucagagccaccaaaaaaaaaaaaaaaaaaaaaaaaaaaaaaaaaaaaaaaaaaaaaaaaaaaaaaaaaaaaaaaaaaaaaaaaaaaaaaaaaaaaaaaaaaaaaaaaaaaaa

SEQ ID NO: 1231 - RNA, 938 nt, Artificial Sequence
  mRNA product Design a-1 (hSL-A100) comprising derived and/or modified sequence from RVA/Wa-VirWa/P[8]__ACR22783.1__SP-IgE_P2_VP8*(41-223) (opt1)
aggagagucccgcagucggcguccagcggcucugcuuguucgugugugugucguugcaggccuuauucaagcuuaccauggacuggaccuggauccuguuccucguggccgccgcgacccgcguccacagccaguacaucaaggccaacagcaaguucaucggcaucaccgagcugggcagcggguccggcgcccagacccgguacgcgcccgugaacugggggcacggcgagaucaacgacuccaccaccguggagcccauccucgacgggcccuaccagccgacgaccuucaccccgcccaacgacuacuggauccugaucaacagcaacaccaacggcgucguguacgaguccacgaacaacagcgacuucuggaccgccguggucgccaucgagccccacgugaacccgguggaccgccaguacaccaucuucggggaguccaagcaguucaacguccggaacgacagcaacaaguggaaguuccuggagauguuccgcuccagcucccagaacgaguucuacaaccggcgcacccucacgagcgacacccggcuggugggcauccugaaguacggcgggcgcguguggaccuuccacggcgagaccccgcgggccacgaccgacuccagcuccaccgccaaccucaacaacaucagcaucaccauccacuccgaguucuacaucaucccccgcagccaggagagcaagugcaacgaguacaucaacaacgggcugugaggacuagucccuguucccagagcccacuuuuuuuucuuuuuuugaaauaaaauagccugucuuucagaucucaaaggcucuuuucagagccaccaaaaaaaaaaaaaaaaaaaaaaaaaaaaaaaaaaaaaaaaaaaaaaaaaaaaaaaaaaaaaaaaaaaaaaaaaaaaaaaaaaaaaaaaaaaaaaaaaaaaa

SEQ ID NO: 1232 - RNA, 938 nt, Artificial Sequence
  mRNA product Design a-1 (hSL-A100) comprising derived and/or modified sequence from RVA/Wa/P[8]__AAA47290.1__SP-IgE_P2_VP8*(41-223) (opt1)
aggagagucccgcagucggcguccagcggcucugcuuguucgugugugugucguugcaggccuuauucaagcuuaccauggacuggaccuggauccuguuccucguggccgccgcgacccgcguccacagccaguacaucaaggccaacagcaaguucaucggcaucaccgagcugggcagcggguccggcgcccagacccgguacgcgcccgugaacugggggcacggcgagaucaacgacuccaccaccguggagcccauccucgacgggcccuaccagccgacgaccuucaccccgcccaacgacuacuggauccugaucaacagcaacaccaacggcgucguguacgaguccacgaacaacagcgacuucuggaccgccguggucgccaucgagccccacgugaaccccguggaccgccaguacaccaucuucggggaguccaagcaguucaacgucagcaacgacuccaacaaguggaaguuccuggagauguuccggagcuccagccagaacgaguucuacaaccgccggacccucacguccgacacccgcuucgugggcauccugaaguacggcgggcggguguggaccuuccacggcgagacgccccgcgccaccaccgacagcuccagcaccgccaaccugaacaacaucuccaucaccauccacagcgaguucuacaucaucccccggagccaggaguccaagugcaacgaguacaucaacaacgggcugugaggacuagucccuguucccagagcccacuuuuuuuucuuuuuuugaaauaaaauagccugucuuucagaucucaaaggcucuuuucagagccaccaaaaaaaaaaaaaaaaaaaaaaaaaaaaaaaaaaaaaaaaaaaaaaaaaaaaaaaaaaaaaaaaaaaaaaaaaaaaaaaaaaaaaaaaaaaaaaaaaaaaa

SEQ ID NO: 1233 - RNA, 938 nt, Artificial Sequence
  mRNA product Design a-1 (hSL-A100) comprising derived and/or modified sequence from RVA/Wa/P[8]__AAA66953.1__SP-IgE_P2_VP8*(41-223) (opt1)
aggagagucccgcagucggcguccagcggcucugcuuguucgugugugugucguugcaggccuuauucaagcuuaccauggacuggaccuggauccuguuccucguggccgccgcgacccgcguccacagccaguacaucaaggccaacagcaaguucaucggcaucaccgagcugggcagcggguccggcgcccagacccgguacgcgcccgugaacugggggcacggcgagaucaacgacuccaccaccguggagcccaugcucgacgggcccuaccagccgacgaccuucaccccgcccaacgacuacuggauccugaucaacagcaacaccaacggcgucguguacgaguccacgaacaacagcgacuucuggaccgccguggucgccaucgagccccacgugaaccccguggaccgccaguacaccaucuucggggaguccaagcaguucaacgucagcaacgacuccaacaaguggaaguuccuggagauguuccggagcuccagccagaacgaguucuacaaccgccggacccucacguccgacacccgcuucgugggcauccugaaguacggcgggcggguguggaccuuccacggcgagacgccccgcgccaccaccgacagcuccagcaccgccaaccugaacaacaucuccaucaccauccacagcgaguucuacaucaucccccggagccaggaguccaagugcaacgaguacaucaacaacgggcugugaggacuagucccuguucccagagcccacuuuuuuuucuuuuuuugaaauaaaauagccugucuuucagaucucaaaggcucuuuucagagccaccaaaaaaaaaaaaaaaaaaaaaaaaaaaaaaaaaaaaaaaaaaaaaaaaaaaaaaaaaaaaaaaaaaaaaaaaaaaaaaaaaaaaaaaaaaaaaaaaaaaaa

SEQ ID NO: 1234 - RNA, 815 nt, Artificial Sequence
  mRNA product Design a-1 (hSL-A100) comprising derived and/or modified sequence from RVA/BE1058/P[4]__AEX30665.1__P2_VP8*(65-223) (opt1)
aggagagucccgcagucggcguccagcggcucugcuuguucgugugugugucguugcaggccuuauucaagcuuaccaugcaguacaucaaggccaacagcaaguucaucggcaucaccgagcugggguccggcagcgggcucgacggccccuaccagccgaccacguucaagccgcccaacgacuacuggcugcugaucuccagcaacaccgacgggguggucuacgaguccaccaacaacagcgacuucuggaccgccgugaucgcgguggagccccacgucaaccagacgaaccgccaguacguccucuucggcgagaacaagcaguucaacaucgagaacuccagcgacaaguggaaguucuucgagauguucaagggcaacucccagagcgacuucuccaaccggcgcacccugaccagcuccaaccggcugguggggaugcucaaguacggcgggcgcguguggaccuuccacggcgagacgccccgggccaccaccgacagcuccagcaccgccgaccugaacaacaucuccaucaucauccacagcgaguucuacaucaucccccgcucccaggagagcaagugcaacgaguacaucaacaacgggcugugaggacuagucccuguucccagagcccacuuuuuuuucuuuuuuugaaauaaaauagccugucuuucagaucucaaaggcucuuuucagagccaccaaaaaaaaaaaaaaaaaaaaaaaaaaaaaaaaaaaaaaaaaaaaaaaaaaaaaaaaaaaaaaaaaaaaaaaaaaaaaaaaaaaaaaaaaaaaaaaaaaaaa

SEQ ID NO: 1235 - RNA, 815 nt, Artificial Sequence
  mRNA product Design a-1 (hSL-A100) comprising derived and/or modified sequence from RVA/DS-1/P[4]__CAD62680.1__P2_VP8*(65-223) (opt1)
aggagagucccgcagucggcguccagcggcucugcuuguucgugugugugucguugcaggccuuauucaagcuuaccaugcaguacaucaaggccaacagcaaguucaucggcaucaccgagcugggguccggcagcgggcucgacggccccuaccagccgaccacguucaagccgcccaacgacuacuggcugcugaucuccagcaacaccaacgggguggucuacgaguccaccaacaacaacgacuucuggaccgccgugagcuccguggagccccacgucagccagacgaaccgccaguacauccucuucggcgagaacaagcaguucaacguggagaacaacuccgacaaguggaaguucuucgagaccuucaccggcagcucccaggggaacuucagcaaccggcgcacccugacguccagcaaccggcuggugggcaugcucaaguacgggggccgcgucuggaccuuccacggggagacgccccgggcgaccaccgacuccagcaacaccgccgaccugaacaacaucuccaucaucauccacagcgaguucuacaucaucccccgcucccaggagagcaagugcaacgaguacaucaacaacggccugugaggacuagucccuguucccagagcccacuuuuuuuucuuuuuuugaaauaaaauagccugucuuucagaucucaaaggcucuuuucagagccaccaaaaaaaaaaaaaaaaaaaaaaaaaaaaaaaaaaaaaaaaaaaaaaaaaaaaaaaaaaaaaaaaaaaaaaaaaaaaaaaaaaaaaaaaaaaaaaaaaaaaa

SEQ ID NO: 1236 - RNA, 815 nt, Artificial Sequence; identical to SEQ ID NO: 1235
  mRNA product Design a-1 (hSL-A100) comprising derived and/or modified sequence from RVA/DS-1/P[4]__ABV53252.1__P2_VP8*(65-223) (opt1)

SEQ ID NO: 1237 - RNA, 815 nt, Artificial Sequence
  mRNA product Design a-1 (hSL-A100) comprising derived and/or modified sequence from RVA/F01322/P[6]__AFA51886.1__P2_VP8*(65-223) (opt1)
aggagagucccgcagucggcguccagcggcucugcuuguucgugugugugucguugcaggccuuauucaagcuuaccaugcaguacaucaaggccaacagcaaguucaucggcaucaccgagcugggguccggcagcgggcucgacggccccuaccagccgaccaacuucaagccgcccaacgacuacuggauccugcugaaccccacgaaccagcaggucgugcucgaggggaccaacaagaccgacaucuggguggcccugcugcucguggagcccaacgucaccaaccagucccgccaguacacgcuguucggcgagaccaagcagaucaccguggagaacaacaccaacaaguggaaguucuucgagauguuccggagcuccgugagcgcggaguuccagcacaagcgcacgcugaccuccgacaccaagcucgccggcuucaugaaguucuacaacagcgucuggaccuuccacggggagacgcccaacgccaccaccgacuacuccagcaccuccaaccuguucgagguggagacggugauccacgucgaguucuacaucaucccccggagccaggaguccaagugcagcgaguacaucaacaccggccugugaggacuagucccuguucccagagcccacuuuuuuuucuuuuuuugaaauaaaauagccugucuuucagaucucaaaggcucuuuucagagccaccaaaaaaaaaaaaaaaaaaaaaaaaaaaaaaaaaaaaaaaaaaaaaaaaaaaaaaaaaaaaaaaaaaaaaaaaaaaaaaaaaaaaaaaaaaaaaaaaaaaaa

SEQ ID NO: 1238 - RNA, 815 nt, Artificial Sequence
  mRNA product Design a-1 (hSL-A100) comprising derived and/or modified sequence from RVA/1076/P[6]__AAA47337.1__P2_VP8*(65-223) (opt1)
aggagagucccgcagucggcguccagcggcucugcuuguucgugugugugucguugcaggccuuauucaagcuuaccaugcaguacaucaaggccaacagcaaguucaucggcaucaccgagcugggguccggcagcgggcucgacggccccuaccagccgaccuccuucaagccgcccagcgacuacuggauccugcugaaccccacgaaccagcaggucgugcucgaggggaccaacaagaccgacaucuggguggcccugcugcucguggagcccaacgucaccaaccagucccgccaguacacgcuguucggcgagaccaagcagaucaccguggagaacaacaccaacaaguggaaguucuucgagauguuccggagcuccgugagcgcggaguuccagcacaagcgcacgcugaccuccgacaccaagcucgccggcuuccugaaguucuacaacagcgucuggaccuucuacggggagacgccccacgccaccaccgacuacuccagcaccuccaaccugagcgagguggagacggccauccacguggaguucuacaucaucccccggucccaggagagcaagugcaacgaguacaucaacaccggccucugaggacuagucccuguucccagagcccacuuuuuuuucuuuuuuugaaauaaaauagccugucuuucagaucucaaaggcucuuuucagagccaccaaaaaaaaaaaaaaaaaaaaaaaaaaaaaaaaaaaaaaaaaaaaaaaaaaaaaaaaaaaaaaaaaaaaaaaaaaaaaaaaaaaaaaaaaaaaaaaaaaaaa

SEQ ID NO: 1239 - RNA, 815 nt, Artificial Sequence
  mRNA product Design a-1 (hSL-A100) comprising derived and/or modified sequence from RVA/BE1128/P[8]__AEX30671.1__P2_VP8*(65-223) (opt1)
aggagagucccgcagucggcguccagcggcucugcuuguucgugugugugucguugcaggccuuauucaagcuuaccaugcaguacaucaaggccaacagcaaguucaucggcaucaccgagcugggguccggcagcgggcucgacggccccuaccagccgaccacguucaccccgcccaccgacuacuggauccugaucaccuccaacacgaacgggguggucuacgagagcaccaacaacuccgacuucuggaccgccgugaucgcgguggagccccacgucaaccccguggaccgccaguacaacguguucggcgagaacaagcaguucaacguccggaacgacagcgacaaguggaaguuccuggagauguuccgcggcuccagccagaacgacuucuacaaccggcgcacccucacguccgacacccggcugguggggauccugaaguacggcgggcgcguguggaccuuccacggcgagacgccccgggccaccaccgacagcuccaacaccgccaaccucgacgggaucagcaucaccauccacuccgaguucuacaucaucccccgcagccaggaguccaagugcaacgaguacaucaacaacggccugugaggacuagucccuguucccagagcccacuuuuuuuucuuuuuuugaaauaaaauagccugucuuucagaucucaaaggcucuuuucagagccaccaaaaaaaaaaaaaaaaaaaaaaaaaaaaaaaaaaaaaaaaaaaaaaaaaaaaaaaaaaaaaaaaaaaaaaaaaaaaaaaaaaaaaaaaaaaaaaaaaaaaa

SEQ ID NO: 1240 - RNA, 815 nt, Artificial Sequence
  mRNA product Design a-1 (hSL-A100) comprising derived and/or modified sequence from RVA/Wa-VirWa/P[8]__ACR22783.1__P2_VP8*(65-223) (opt1)
aggagagucccgcagucggcguccagcggcucugcuuguucgugugugugucguugcaggccuuauucaagcuuaccaugcaguacaucaaggccaacagcaaguucaucggcaucaccgagcugggguccggcagcgggcucgacggccccuaccagccgaccacguucaccccgcccaacgacuacuggauccugaucaacuccaacaccaacgggguggucuacgagagcaccaacaacuccgacuucuggacggccgugguggcgaucgagccccacgucaaccccguggaccgccaguacaccaucuucggcgagagcaagcaguucaacgugcggaacgacuccaacaaguggaaguuccuggagauguuccgcagcuccagccagaacgaguucuacaaccggcgcacccucaccuccgacacgcggcuggucggcauccugaaguacgggggccgcguguggaccuuccacggggagacgccccgggccaccaccgacagcuccagcaccgccaaccucaacaacaucuccaucaccauccacagcgaguucuacaucaucccccgcucccaggagagcaagugcaacgaguacaucaacaacggccugugaggacuagucccuguucccagagcccacuuuuuuuucuuuuuuugaaauaaaauagccugucuuucagaucucaaaggcucuuuucagagccaccaaaaaaaaaaaaaaaaaaaaaaaaaaaaaaaaaaaaaaaaaaaaaaaaaaaaaaaaaaaaaaaaaaaaaaaaaaaaaaaaaaaaaaaaaaaaaaaaaaaaa

SEQ ID NO: 1241 - RNA, 815 nt, Artificial Sequence
  mRNA product Design a-1 (hSL-A100) comprising derived and/or modified sequence from RVA/Wa/P[8]__AAA47290.1__P2_VP8*(65-223) (opt1)
aggagagucccgcagucggcguccagcggcucugcuuguucgugugugugucguugcaggccuuauucaagcuuaccaugcaguacaucaaggccaacagcaaguucaucggcaucaccgagcugggguccggcagcgggcucgacggccccuaccagccgaccacguucaccccgcccaacgacuacuggauccugaucaacuccaacaccaacgggguggucuacgagagcaccaacaacuccgacuucuggacggccgugguggcgaucgagccccacgucaaccccguggaccgccaguacaccaucuucggcgagagcaagcaguucaacguguccaacgacagcaacaaguggaaguuccuggagauguuccgguccagcucccagaacgaguucuacaaccgccggacccucaccagcgacacgcgcuucgucggcauccugaaguacgggggccggguguggaccuuccacggggagacgccccgcgccaccaccgacuccagcuccaccgccaaccugaacaacaucagcaucaccauccacuccgaguucuacaucaucccccggagccaggaguccaagugcaacgaguacaucaacaacggccucugaggacuagucccuguucccagagcccacuuuuuuuucuuuuuuugaaauaaaauagccugucuuucagaucucaaaggcucuuuucagagccaccaaaaaaaaaaaaaaaaaaaaaaaaaaaaaaaaaaaaaaaaaaaaaaaaaaaaaaaaaaaaaaaaaaaaaaaaaaaaaaaaaaaaaaaaaaaaaaaaaaaaa

SEQ ID NO: 1242 - RNA, 815 nt, Artificial Sequence; identical to SEQ ID NO: 1241
  mRNA product Design a-1 (hSL-A100) comprising derived and/or modified sequence from RVA/Wa/P[8]__AAA66953.1__P2_VP8*(65-223) (opt1)

SEQ ID NO: 1243 - RNA, 887 nt, Artificial Sequence
  mRNA product Design a-1 (hSL-A100) comprising derived and/or modified sequence from RVA/BE1058/P[4]__AEX30665.1__P2_VP8*(41-223) (opt1)
aggagagucccgcagucggcguccagcggcucugcuuguucgugugugugucguugcaggccuuauucaagcuuaccaugcaguacaucaaggccaacagcaaguucaucggcaucaccgagcugggguccggcagcggggcccagacccgcuacgcgcccgugaacuggggccacggggagaucaacgacuccacgaccgucgagccggugcucgacggccccuaccagcccaccaccuucaagcccccgaacgacuacuggcugcugaucagcuccaacacggacggcguggucuacgagagcaccaacaacuccgacuucuggaccgccgugaucgccguggagccccacgucaaccagaccaaccggcaguacguccucuucggggagaacaagcaguucaacaucgagaacagcuccgacaaguggaaguucuucgagauguucaagggcaacagccaguccgacuucagcaaccgccggacgcugaccuccagcaaccgccugguggggaugcucaaguacggcgggcggguguggaccuuccacggcgagacgccccgcgccaccaccgacuccagcuccaccgccgaccugaacaacaucagcaucaucauccacuccgaguucuacaucaucccccggagccaggagagcaagugcaacgaguacaucaacaacggccugugaggacuagucccuguucccagagcccacuuuuuuuucuuuuuuugaaauaaaauagccugucuuucagaucucaaaggcucuuuucagagccaccaaaaaaaaaaaaaaaaaaaaaaaaaaaaaaaaaaaaaaaaaaaaaaaaaaaaaaaaaaaaaaaaaaaaaaaaaaaaaaaaaaaaaaaaaaaaaaaaaaaaa

SEQ ID NO: 1244 - RNA, 887 nt, Artificial Sequence
  mRNA product Design a-1 (hSL-A100) comprising derived and/or modified sequence from RVA/DS-1/P[4]__CAD62680.1__P2_VP8*(41-223) (opt1)
aggagagucccgcagucggcguccagcggcucugcuuguucgugugugugucguugcaggccuuauucaagcuuaccaugcaguacaucaaggccaacagcaaguucaucggcaucaccgagcugggguccggcagcggggcccagacccgcuacgcgcccgugaacuggggcuccugggagaucaacgacagcacgaccgucgagccggugcucgacgggcccuaccagcccaccaccuucaagcccccgaacgacuacuggcugcugaucuccagcaacacgaacggcguggucuacgaguccaccaacaacaacgacuucuggaccgccgugagcuccguggagccccacgucagccagaccaaccggcaguacauccucuucggcgagaacaagcaguucaacguggagaacaacuccgacaaguggaaguucuucgagacguucaccgggagcucccagggcaacuucagcaaccgccggacccugaccuccagcaaccgccugguggggaugcucaaguacggcgggcgggucuggacguuccacggcgagacgccccgcgccaccaccgacuccagcaacaccgccgaccugaacaacaucuccaucaucauccacagcgaguucuacaucaucccccggagccaggaguccaagugcaacgaguacaucaacaacggccugugaggacuagucccuguucccagagcccacuuuuuuuucuuuuuuugaaauaaaauagccugucuuucagaucucaaaggcucuuuucagagccaccaaaaaaaaaaaaaaaaaaaaaaaaaaaaaaaaaaaaaaaaaaaaaaaaaaaaaaaaaaaaaaaaaaaaaaaaaaaaaaaaaaaaaaaaaaaaaaaaaaaaa

SEQ ID NO: 1245 - RNA, 887 nt, Artificial Sequence; identical to SEQ ID NO: 1244
  mRNA product Design a-1 (hSL-A100) comprising derived and/or modified sequence from RVA/DS-1/P[4]__ABV53252.1__P2_VP8*(41-223) (opt1)

SEQ ID NO: 1246 - RNA, 887 nt, Artificial Sequence
  mRNA product Design a-1 (hSL-A100) comprising derived and/or modified sequence from RVA/F01322/P[6]__AFA51886.1__P2_VP8*(41-223) (opt1)
aggagagucccgcagucggcguccagcggcucugcuuguucgugugugugucguugcaggccuuauucaagcuuaccaugcaguacaucaaggccaacagcaaguucaucggcaucaccgagcugggguccggcagcggggcccagaccaacuacgcgcccgugacguggucccacggcgaggucaacgacagcaccaccaucgagccggugcucgacgggcccuaccagcccaccaacuucaagcccccgaacgacuacuggauccugcugaaccccacgaaccagcaggucgugcucgagggcaccaacaagaccgacaucuggguggcccugcugcucguggagcccaacgucaccaaccagucccgccaguacacgcuguucggcgagaccaagcagaucaccguggagaacaacaccaacaaguggaaguucuucgagauguuccggagcuccgugagcgccgaguuccagcacaagcgcacgcugaccuccgacaccaagcucgccggguucaugaaguucuacaacagcgucuggaccuuccacggcgagacgcccaacgccaccaccgacuacuccagcaccuccaaccuguucgagguggagacggugauccacgucgaguucuacaucaucccgcggagccaggaguccaagugcagcgaguacaucaacaccgggcugugaggacuagucccuguucccagagcccacuuuuuuuucuuuuuuugaaauaaaauagccugucuuucagaucucaaaggcucuuuucagagccaccaaaaaaaaaaaaaaaaaaaaaaaaaaaaaaaaaaaaaaaaaaaaaaaaaaaaaaaaaaaaaaaaaaaaaaaaaaaaaaaaaaaaaaaaaaaaaaaaaaaaa

SEQ ID NO: 1247 - RNA, 887 nt, Artificial Sequence
  mRNA product Design a-1 (hSL-A100) comprising derived and/or modified sequence from RVA/1076/P[6]__AAA47337.1__P2_VP8*(41-223) (opt1)
aggagagucccgcagucggcguccagcggcucugcuuguucgugugugugucguugcaggccuuauucaagcuuaccaugcaguacaucaaggccaacagcaaguucaucggcaucaccgagcugggguccggcagcggggcccagaccaacuacgcgcccgugacguggucccacggcgaggucaacgacagcaccaccaucgagccggugcucgacgggcccuaccagcccaccuccuucaagcccccgagcgacuacuggauccugcugaaccccacgaaccagcaggucgugcucgagggcaccaacaagaccgacaucuggguggcccugcugcucguggagcccaacgucaccaaccagucccgccaguacacgcuguucggcgagaccaagcagaucaccguggagaacaacaccaacaaguggaaguucuucgagauguuccggagcuccgugagcgccgaguuccagcacaagcgcacgcugaccuccgacaccaagcucgccggguuccugaaguucuacaacagcgucuggaccuucuacggcgagacgccccacgccaccaccgacuacuccagcaccuccaaccugagcgagguggagacggcgauccacguggaguucuacaucaucccgcggucccaggagagcaagugcaacgaguacaucaacaccgggcucugaggacuagucccuguucccagagcccacuuuuuuuucuuuuuuugaaauaaaauagccugucuuucagaucucaaaggcucuuuucagagccaccaaaaaaaaaaaaaaaaaaaaaaaaaaaaaaaaaaaaaaaaaaaaaaaaaaaaaaaaaaaaaaaaaaaaaaaaaaaaaaaaaaaaaaaaaaaaaaaaaaaaa

SEQ ID NO: 1248 - RNA, 887 nt, Artificial Sequence
  mRNA product Design a-1 (hSL-A100) comprising derived and/or modified sequence from RVA/BE1128/P[8]__AEX30671.1__P2_VP8*(41-223) (opt1)
aggagagucccgcagucggcguccagcggcucugcuuguucgugugugugucguugcaggccuuauucaagcuuaccaugcaguacaucaaggccaacagcaaguucaucggcaucaccgagcugggguccggcagcggggcccagacccgcuacgcgcccgugaacuggggccacggggagaucaacgacuccacgaccgucgagccgauccucgacggccccuaccagcccaccaccuucacgcccccgaccgacuacuggauccugaucaccagcaacaccaacggcgugguguacgaguccacgaacaacagcgacuucuggaccgccgucaucgccguggagccccacgugaaccccgucgaccggcaguacaacguguucggggagaacaagcaguucaacgugcgcaacgacuccgacaaguggaaguuccuggagauguuccggggcagcucccagaacgacuucuacaaccgccggacccucaccagcgacacgcgccuggucgggauccugaaguacggcgggcggguguggaccuuccacggcgagacgccccgcgccaccaccgacuccagcaacaccgccaaccucgacggcaucuccaucaccauccacagcgaguucuacaucaucccgcggucccaggagagcaagugcaacgaguacaucaacaacgggcugugaggacuagucccuguucccagagcccacuuuuuuuucuuuuuuugaaauaaaauagccugucuuucagaucucaaaggcucuuuucagagccaccaaaaaaaaaaaaaaaaaaaaaaaaaaaaaaaaaaaaaaaaaaaaaaaaaaaaaaaaaaaaaaaaaaaaaaaaaaaaaaaaaaaaaaaaaaaaaaaaaaaaa

SEQ ID NO: 1249 - RNA, 887 nt, Artificial Sequence
  mRNA product Design a-1 (hSL-A100) comprising derived and/or modified sequence from RVA/Wa-VirWa/P[8]__ACR22783.1__P2_VP8*(41-223) (opt1)
aggagagucccgcagucggcguccagcggcucugcuuguucgugugugugucguugcaggccuuauucaagcuuaccaugcaguacaucaaggccaacagcaaguucaucggcaucaccgagcugggguccggcagcggggcccagacccgcuacgcgcccgugaacuggggccacggggagaucaacgacuccacgaccgucgagccgauccucgacggccccuaccagcccaccaccuucacgcccccgaacgacuacuggauccugaucaacagcaacaccaacggcgugguguacgaguccaccaacaacagcgacuucuggaccgccgucguggccaucgagccccacgugaaccccgucgaccggcaguacacgaucuucggggaguccaagcaguucaacgugcgcaacgacagcaacaaguggaaguuccuggagauguuccgguccagcucccagaacgaguucuacaaccgccggacccucaccagcgacacccgccuggugggcauccugaaguacgggggccgggucuggacguuccacggggagacgccccgcgccaccaccgacuccagcuccaccgccaaccucaacaacaucagcaucaccauccacuccgaguucuacaucaucccgcggagccaggaguccaagugcaacgaguacaucaacaacggccugugaggacuagucccuguucccagagcccacuuuuuuuucuuuuuuugaaauaaaauagccugucuuucagaucucaaaggcucuuuucagagccaccaaaaaaaaaaaaaaaaaaaaaaaaaaaaaaaaaaaaaaaaaaaaaaaaaaaaaaaaaaaaaaaaaaaaaaaaaaaaaaaaaaaaaaaaaaaaaaaaaaaaa

SEQ ID NO: 1250 - RNA, 887 nt, Artificial Sequence
  mRNA product Design a-1 (hSL-A100) comprising derived and/or modified sequence from RVA/Wa/P[8]__AAA47290.1__P2_VP8*(41-223) (opt1)
aggagagucccgcagucggcguccagcggcucugcuuguucgugugugugucguugcaggccuuauucaagcuuaccaugcaguacaucaaggccaacagcaaguucaucggcaucaccgagcugggguccggcagcggggcccagacccgcuacgcgcccgugaacuggggccacggggagaucaacgacuccacgaccgucgagccgauccucgacggccccuaccagcccaccaccuucacgcccccgaacgacuacuggauccugaucaacagcaacaccaacggcgugguguacgaguccaccaacaacagcgacuucuggaccgccgucguggccaucgagccccacgugaaccccgucgaccggcaguacacgaucuucggggaguccaagcaguucaacgugagcaacgacuccaacaaguggaaguuccuggagauguuccgcagcuccagccagaacgaguucuacaaccggcgcacccucaccuccgacacccgguucgugggcauccugaaguacgggggccgcgucuggacguuccacggggagacgccccgggccaccaccgacagcuccagcaccgccaaccugaacaacaucuccaucaccauccacagcgaguucuacaucaucccgcgcucccaggagagcaagugcaacgaguacaucaacaacggccucugaggacuagucccuguucccagagcccacuuuuuuuucuuuuuuugaaauaaaauagccugucuuucagaucucaaaggcucuuuucagagccaccaaaaaaaaaaaaaaaaaaaaaaaaaaaaaaaaaaaaaaaaaaaaaaaaaaaaaaaaaaaaaaaaaaaaaaaaaaaaaaaaaaaaaaaaaaaaaaaaaaaaa

SEQ ID NO: 1251 - RNA, 887 nt, Artificial Sequence
  mRNA product Design a-1 (hSL-A100) comprising derived and/or modified sequence from RVA/Wa/P[8]__AAA66953.1__P2_VP8*(41-223) (opt1)
aggagagucccgcagucggcguccagcggcucugcuuguucgugugugugucguugcaggccuuauucaagcuuaccaugcaguacaucaaggccaacagcaaguucaucggcaucaccgagcugggguccggcagcggggcccagacccgcuacgcgcccgugaacuggggccacggggagaucaacgacuccacgaccgucgagccgaugcucgacggccccuaccagcccaccaccuucacgcccccgaacgacuacuggauccugaucaacagcaacaccaacggcgugguguacgaguccaccaacaacagcgacuucuggaccgccgucguggccaucgagccccacgugaaccccgucgaccggcaguacacgaucuucggggaguccaagcaguucaacgugagcaacgacuccaacaaguggaaguuccuggagauguuccgcagcuccagccagaacgaguucuacaaccggcgcacccucaccuccgacacccgguucgugggcauccugaaguacgggggccgcgucuggacguuccacggggagacgccccgggccaccaccgacagcuccagcaccgccaaccugaacaacaucuccaucaccauccacagcgaguucuacaucaucccgcgcucccaggagagcaagugcaacgaguacaucaacaacggccucugaggacuagucccuguucccagagcccacuuuuuuuucuuuuuuugaaauaaaauagccugucuuucagaucucaaaggcucuuuucagagccaccaaaaaaaaaaaaaaaaaaaaaaaaaaaaaaaaaaaaaaaaaaaaaaaaaaaaaaaaaaaaaaaaaaaaaaaaaaaaaaaaaaaaaaaaaaaaaaaaaaaaa

SEQ ID NO: 1252 - RNA, 1313 nt, Artificial Sequence
  mRNA product Design a-1 (hSL-A100) comprising derived and/or modified sequence from RVA/BE1058/P[4]__AEX30665.1__P2_VP8*(65-223)_Ferritin (opt1)
aggagagucccgcagucggcguccagcggcucugcuuguucgugugugugucguugcaggccuuauucaagcuuaccaugcaguacaucaaggccaacagcaaguucaucggcaucaccgagcugggguccggcagcgggcucgacggccccuaccagccgaccacguucaagccgcccaacgacuacuggcugcugaucuccagcaacaccgacgggguggucuacgaguccaccaacaacagcgacuucuggaccgccgugaucgcgguggagccccacgucaaccagacgaaccgccaguacguccucuucggcgagaacaagcaguucaacaucgagaacuccagcgacaaguggaaguucuucgagauguucaagggcaacucccagagcgacuucuccaaccggcgcacccugaccagcuccaaccggcugguggggaugcucaaguacggcgggcgcguguggaccuuccacggcgagacgccccgggccaccaccgacagcuccagcaccgccgaccugaacaacaucuccaucaucauccacagcgaguucuacaucaucccccgcucccaggagagcaagugcaacgaguacaucaacaacgggcugagcggcggcgacaucaucaagcuccugaacgagcaggucaacaaggagaugcaguccagcaaccuguacauguccaugagcuccuggugcuacacgcacagccucgacggggccggccuguuccuguucgaccacgccgcggaggaguacgagcacgccaagaagcucaucaucuuccugaacgagaacaacgugcccgugcagcugaccuccaucagcgcccccgagcacaaguucgaggggcucacccagaucuuccagaaggccuacgagcacgagcagcacaucuccgagagcaucaacaacaucguggaccacgcgaucaaguccaaggaccacgccaccuucaacuuccugcagugguacguggccgagcagcacgaggaggagguccuguucaaggacauccucgacaagaucgagcugaucggcaacgagaaccacggccuguaccucgccgaccaguacgugaaggggaucgccaagagccggaaguccugaggacuagucccuguucccagagcccacuuuuuuuucuuuuuuugaaauaaaauagccugucuuucagaucucaaaggcucuuuucagagccaccaaaaaaaaaaaaaaaaaaaaaaaaaaaaaaaaaaaaaaaaaaaaaaaaaaaaaaaaaaaaaaaaaaaaaaaaaaaaaaaaaaaaaaaaaaaaaaaaaaaaa

SEQ ID NO: 1253 - RNA, 1313 nt, Artificial Sequence
  mRNA product Design a-1 (hSL-A100) comprising derived and/or modified sequence from RVA/DS-1/P[4]__CAD62680.1__P2_VP8*(65-223)_Ferritin (opt1)
aggagagucccgcagucggcguccagcggcucugcuuguucgugugugugucguugcaggccuuauucaagcuuaccaugcaguacaucaaggccaacagcaaguucaucggcaucaccgagcugggguccggcagcgggcucgacggccccuaccagccgaccacguucaagccgcccaacgacuacuggcugcugaucuccagcaacaccaacgggguggucuacgaguccaccaacaacaacgacuucuggaccgccgugagcuccguggagccccacgucagccagacgaaccgccaguacauccucuucggcgagaacaagcaguucaacguggagaacaacuccgacaaguggaaguucuucgagaccuucaccggcagcucccaggggaacuucagcaaccggcgcacccugacguccagcaaccggcuggugggcaugcucaaguacgggggccgcgucuggaccuuccacggggagacgccccgggcgaccaccgacuccagcaacaccgccgaccugaacaacaucuccaucaucauccacagcgaguucuacaucaucccccgcucccaggagagcaagugcaacgaguacaucaacaacggccugagcggcggggacaucaucaagcuccugaacgagcaggucaacaaggagaugcaguccagcaaccuguacauguccaugagcuccuggugcuacacccacagccucgacggcgccgggcuguuccuguucgaccacgccgccgaggaguacgagcacgcgaagaagcucaucaucuuccugaacgagaacaacgugcccgugcagcugaccuccaucagcgcccccgagcacaaguucgagggccucacgcagaucuuccagaaggccuacgagcacgagcagcacaucuccgagagcaucaacaacaucguggaccacgccaucaaguccaaggaccacgcgaccuucaacuuccugcagugguacguggccgagcagcacgaggaggagguccuguucaaggacauccucgacaagaucgagcugaucggcaacgagaaccacgggcuguaccucgccgaccaguacgugaagggcaucgccaagagccggaaguccugaggacuagucccuguucccagagcccacuuuuuuuucuuuuuuugaaauaaaauagccugucuuucagaucucaaaggcucuuuucagagccaccaaaaaaaaaaaaaaaaaaaaaaaaaaaaaaaaaaaaaaaaaaaaaaaaaaaaaaaaaaaaaaaaaaaaaaaaaaaaaaaaaaaaaaaaaaaaaaaaaaaaa

SEQ ID NO: 1254 - RNA, 1313 nt, Artificial Sequence; identical to SEQ ID NO: 1253
  mRNA product Design a-1 (hSL-A100) comprising derived and/or modified sequence from RVA/DS-1/P[4]__ABV53252.1__P2_VP8*(65-223)_Ferritin (opt1)

SEQ ID NO: 1255 - RNA, 1313 nt, Artificial Sequence
  mRNA product Design a-1 (hSL-A100) comprising derived and/or modified sequence from RVA/F01322/P[6]__AFA51886.1__P2_VP8*(65-223)_Ferritin (opt1)
aggagagucccgcagucggcguccagcggcucugcuuguucgugugugugucguugcaggccuuauucaagcuuaccaugcaguacaucaaggccaacagcaaguucaucggcaucaccgagcugggguccggcagcgggcucgacggccccuaccagccgaccaacuucaagccgcccaacgacuacuggauccugcugaaccccacgaaccagcaggucgugcucgaggggaccaacaagaccgacaucuggguggcccugcugcucguggagcccaacgucaccaaccagucccgccaguacacgcuguucggcgagaccaagcagaucaccguggagaacaacaccaacaaguggaaguucuucgagauguuccggagcuccgugagcgcggaguuccagcacaagcgcacgcugaccuccgacaccaagcucgccggcuucaugaaguucuacaacagcgucuggaccuuccacggggagacgcccaacgccaccaccgacuacuccagcaccuccaaccuguucgagguggagacggugauccacgucgaguucuacaucaucccccggagccaggaguccaagugcagcgaguacaucaacaccggccuguccgggggcgacaucaucaagcuccugaacgagcaggucaacaaggagaugcagagcuccaaccuguacaugagcauguccagcuggugcuacacccacagccucgacggggccggccuguuccuguucgaccacgccgcggaggaguacgagcacgccaagaagcucaucaucuuccugaacgagaacaacgugcccgugcagcugaccuccaucagcgccccggagcacaaguucgagggccucacgcagaucuuccagaaggccuacgagcacgagcagcacaucuccgagagcaucaacaacaucguggaccacgcgaucaaguccaaggaccacgccaccuucaacuuccugcagugguacguggccgagcagcacgaggaggagguccuguucaaggacauccucgacaagaucgagcugaucgggaacgagaaccacggccuguaccucgccgaccaguacgugaaggggaucgccaagagccgcaaguccugaggacuagucccuguucccagagcccacuuuuuuuucuuuuuuugaaauaaaauagccugucuuucagaucucaaaggcucuuuucagagccaccaaaaaaaaaaaaaaaaaaaaaaaaaaaaaaaaaaaaaaaaaaaaaaaaaaaaaaaaaaaaaaaaaaaaaaaaaaaaaaaaaaaaaaaaaaaaaaaaaaaaa

SEQ ID NO: 1256 - RNA, 1313 nt, Artificial Sequence
  mRNA product Design a-1 (hSL-A100) comprising derived and/or modified sequence from RVA/1076/P[6]__AAA47337.1__P2_VP8*(65-223)_Ferritin (opt1)
aggagagucccgcagucggcguccagcggcucugcuuguucgugugugugucguugcaggccuuauucaagcuuaccaugcaguacaucaaggcgaacagcaaguucaucggcaucaccgagcugggguccggcagcgggcucgacggccccuaccagccgaccuccuucaagccgcccagcgacuacuggauccugcugaaccccacgaaccagcaggucgugcucgaggggaccaacaagaccgacaucuggguggcccugcugcucguggagcccaacgucaccaaccagucccgccaguacacgcuguucggcgagaccaagcagaucaccguggagaacaacaccaacaaguggaaguucuucgagauguuccggagcuccgugagcgcggaguuccagcacaagcgcacgcugaccuccgacaccaagcucgccggcuuccugaaguucuacaacagcgucuggaccuucuacggggagacgccccacgccaccaccgacuacuccagcaccuccaaccugagcgagguggagacggccauccacguggaguucuacaucaucccccggucccaggagagcaagugcaacgaguacaucaacaccggccucuccgggggcgacaucaucaagcugcugaacgagcaggucaacaaggagaugcagagcuccaaccucuacaugagcaugagcuccuggugcuacacccacagccuggacggggccggccuguuccucuucgaccacgcggccgaggaguacgagcacgccaagaagcugaucaucuuccugaacgagaacaacgugcccgugcagcucaccuccaucagcgccccggagcacaaguucgagggccugacgcagaucuuccagaaggcguacgagcacgagcagcacaucuccgagagcaucaacaacaucgucgaccacgccaucaaguccaaggaccacgccaccuucaacuuccugcagugguacguggccgagcagcacgaggaggagguccucuucaaggacauccuggacaagaucgagcugaucgggaacgagaaccacggccucuaccuggccgaccaguacgugaaggggaucgccaagagccgcaaguccugaggacuagucccuguucccagagcccacuuuuuuuucuuuuuuugaaauaaaauagccugucuuucagaucucaaaggcucuuuucagagccaccaaaaaaaaaaaaaaaaaaaaaaaaaaaaaaaaaaaaaaaaaaaaaaaaaaaaaaaaaaaaaaaaaaaaaaaaaaaaaaaaaaaaaaaaaaaaaaaaaaaaa

SEQ ID NO: 1257 - RNA, 1313 nt, Artificial Sequence
  mRNA product Design a-1 (hSL-A100) comprising derived and/or modified sequence from RVA/BE1128/P[8]__AEX30671.1__P2_VP8*(65-223)_Ferritin (opt1)
aggagagucccgcagucggcguccagcggcucugcuuguucgugugugugucguugcaggccuuauucaagcuuaccaugcaguacaucaaggccaacagcaaguucaucggcaucaccgagcugggguccggcagcgggcucgacggccccuaccagccgaccacguucaccccgcccaccgacuacuggauccugaucaccuccaacacgaacgggguggucuacgagagcaccaacaacuccgacuucuggaccgccgugaucgcgguggagccccacgucaaccccguggaccggcaguacaacguguucggcgagaacaagcaguucaacguccggaacgacagcgacaaguggaaguuccuggagauguuccgcggcuccagccagaacgacuucuacaaccggcgcacccucacguccgacacccggcugguggggauccugaaguacggcgggcgcguguggaccuuccacggcgagacgccccgggccaccaccgacagcuccaacaccgccaaccucgacgggaucagcaucaccauccacuccgaguucuacaucaucccccgcagccaggaguccaagugcaacgaguacaucaacaacggccugagcggcggggacaucaucaagcugcucaacgagcaggucaacaaggagaugcaguccagcaaccuguacauguccaugagcagcuggugcuacacgcacucccuggacggcgccggccucuuccuguucgaccacgccgcggaggaguacgagcacgccaagaagcugaucaucuuccucaacgagaacaacgugcccgugcagcugaccagcaucuccgccccggagcacaaguucgaggggcugacccagaucuuccagaaggccuacgagcacgagcagcacaucagcgaguccaucaacaacaucgucgaccacgcgaucaagagcaaggaccacgccaccuucaacuuccuccagugguacguggccgagcagcacgaggaggaggugcuguucaaggacauccuggacaagaucgagcucaucggcaacgagaaccacgggcuguaccuggccgaccaguacgucaagggcaucgccaagucccgcaagagcugaggacuagucccuguucccagagcccacuuuuuuuucuuuuuuugaaauaaaauagccugucuuucagaucucaaaggcucuuuucagagccaccaaaaaaaaaaaaaaaaaaaaaaaaaaaaaaaaaaaaaaaaaaaaaaaaaaaaaaaaaaaaaaaaaaaaaaaaaaaaaaaaaaaaaaaaaaaaaaaaaaaaa

SEQ ID NO: 1258 - RNA, 1313 nt, Artificial Sequence
  mRNA product Design a-1 (hSL-A100) comprising derived and/or modified sequence from RVA/Wa-VirWa/P[8]__ACR22783.1__P2_VP8*(65-223)_Ferritin (opt1)
aggagagucccgcagucggcguccagcggcucugcuuguucgugugugugucguugcaggccuuauucaagcuuaccaugcaguacaucaaggccaacagcaaguucaucggcaucaccgagcugggguccggcagcgggcucgacggccccuaccagccgaccacguucaccccgcccaacgacuacuggauccugaucaacuccaacaccaacgggguggucuacgagagcaccaacaacuccgacuucuggacggccgugguggcgaucgagccccacgucaaccccguggaccgccaguacaccaucuucggcgagagcaagcaguucaacgugcggaacgacuccaacaaguggaaguuccuggagauguuccgcagcuccagccagaacgaguucuacaaccggcgcacccucaccuccgacacgcggcuggucggcauccugaaguacgggggccgcguguggaccuuccacggggagacgccccgggccaccaccgacagcuccagcaccgccaaccucaacaacaucuccaucaccauccacagcgaguucuacaucaucccccgcucccaggagagcaagugcaacgaguacaucaacaacggccuguccgggggcgacaucaucaagcugcucaacgagcaggucaacaaggagaugcagagcagcaaccuguacauguccaugagcuccuggugcuacacccacagccuggacggcgccggccucuuccuguucgaccacgccgcggaggaguacgagcacgccaagaagcugaucaucuuccucaacgagaacaacgugcccgugcagcugacguccaucagcgccccggagcacaaguucgaggggcugacccagaucuuccagaaggccuacgagcacgagcagcacaucuccgagagcaucaacaacaucguggaccacgcgaucaaguccaaggaccacgccaccuucaacuuccuccagugguacgucgccgagcagcacgaggaggaggugcuguucaaggacauccuggacaagaucgagcucaucgggaacgagaaccacggccuguaccuggccgaccaguacgugaagggcaucgccaagagccggaaguccugaggacuagucccuguucccagagcccacuuuuuuuucuuuuuuugaaauaaaauagccugucuuucagaucucaaaggcucuuuucagagccaccaaaaaaaaaaaaaaaaaaaaaaaaaaaaaaaaaaaaaaaaaaaaaaaaaaaaaaaaaaaaaaaaaaaaaaaaaaaaaaaaaaaaaaaaaaaaaaaaaaaaa

SEQ ID NO: 1259 - RNA, 1313 nt, Artificial Sequence
  mRNA product Design a-1 (hSL-A100) comprising derived and/or modified sequence from RVA/Wa/P[8]__AAA47290.1__P2_VP8*(65-223)_Ferritin (opt1)
aggagagucccgcagucggcguccagcggcucugcuuguucgugugugugucguugcaggccuuauucaagcuuaccaugcaguacaucaaggccaacagcaaguucaucggcaucaccgagcugggguccggcagcgggcucgacggccccuaccagccgaccacguucaccccgcccaacgacuacuggauccugaucaacuccaacaccaacggggugguguacgagagcaccaacaacuccgacuucuggacggccgugguggcgaucgagccccacgucaaccccguggaccgccaguacaccaucuucggcgagagcaagcaguucaacguguccaacgacagcaacaaguggaaguuccuggagauguuccgguccagcucccagaacgaguucuacaaccgccggacccucaccagcgacacgcgcuucgucggcauccugaaguacgggggccggguguggaccuuccacggggagacgccccgcgccaccaccgacuccagcuccaccgccaaccugaacaacaucagcaucaccauccacuccgaguucuacaucaucccccggagccaggaguccaagugcaacgaguacaucaacaacggccucagcgggggcgacaucaucaagcugcugaacgagcaggucaacaaggagaugcagagcuccaaccucuacaugagcauguccagcuggugcuacacccacucccuggacggcgccgggcuguuccucuucgaccacgccgcggaggaguacgagcacgccaagaagcugaucaucuuccugaacgagaacaacgugcccgugcagcucacgagcaucuccgccccggagcacaaguucgagggccugacccagaucuuccagaaggccuacgagcacgagcagcacaucagcgaguccaucaacaacaucguggaccacgcgaucaagagcaaggaccacgccaccuucaacuuccugcagugguacgucgccgagcagcacgaggaggagguccucuucaaggacauccuggacaagaucgagcugaucgggaacgagaaccacggccucuaccuggccgaccaguacgugaagggcaucgccaagucccgcaagagcugaggacuagucccuguucccagagcccacuuuuuuuucuuuuuuugaaauaaaauagccugucuuucagaucucaaaggcucuuuucagagccaccaaaaaaaaaaaaaaaaaaaaaaaaaaaaaaaaaaaaaaaaaaaaaaaaaaaaaaaaaaaaaaaaaaaaaaaaaaaaaaaaaaaaaaaaaaaaaaaaaaaaa

SEQ ID NO: 1260 - RNA, 1313 nt, Artificial Sequence; identical to SEQ ID NO: 1259
  mRNA product Design a-1 (hSL-A100) comprising derived and/or modified sequence from RVA/Wa/P[8]__AAA66953.1__P2_VP8*(65-223)_Ferritin (opt1)

SEQ ID NO: 1261 - RNA, 1385 nt, Artificial Sequence
  mRNA product Design a-1 (hSL-A100) comprising derived and/or modified sequence from RVA/BE1058/P[4]__AEX30665.1__P2_VP8*(41-223)_Ferritin (opt1)
aggagagucccgcagucggcguccagcggcucugcuuguucgugugugugucguugcaggccuuauucaagcuuaccaugcaguacaucaaggccaacagcaaguucaucggcaucaccgagcugggguccggcagcggggcccagacccgcuacgcgcccgugaacuggggccacggggagaucaacgacuccacgaccgucgagccggugcucgacggccccuaccagcccaccaccuucaagcccccgaacgacuacuggcugcugaucagcuccaacacggacggcguggucuacgagagcaccaacaacuccgacuucuggaccgccgugaucgccguggagccccacgucaaccagaccaaccggcaguacguccucuucggggagaacaagcaguucaacaucgagaacagcuccgacaaguggaaguucuucgagauguucaagggcaacagccaguccgacuucagcaaccgccggacgcugaccuccagcaaccgccugguggggaugcucaaguacggcgggcggguguggaccuuccacggcgagacgccccgcgccaccaccgacuccagcuccaccgccgaccugaacaacaucagcaucaucauccacuccgaguucuacaucaucccccggagccaggagagcaagugcaacgaguacaucaacaacggccuguccgggggcgacaucaucaagcuccugaacgagcaggucaacaaggagaugcagagcuccaaccuguacaugagcauguccagcuggugcuacacccacucccucgacggggcgggccuguuccuguucgaccacgccgccgaggaguacgagcacgccaagaagcucaucaucuuccugaacgagaacaacgugccggugcagcugacgagcaucuccgcgcccgagcacaaguucgagggccucacccagaucuuccagaaggccuacgagcacgagcagcacaucagcgaguccaucaacaacaucguggaccacgccaucaagagcaaggaccacgccaccuucaacuuccugcagugguacguggccgagcagcacgaggaggagguccuguucaaggacauccucgacaagaucgagcugaucgggaacgagaaccacggccuguaccucgcggaccaguacgugaaggggaucgccaagucccgcaagagcugaggacuagucccuguucccagagcccacuuuuuuuucuuuuuuugaaauaaaauagccugucuuucagaucucaaaggcucuuuucagagccaccaaaaaaaaaaaaaaaaaaaaaaaaaaaaaaaaaaaaaaaaaaaaaaaaaaaaaaaaaaaaaaaaaaaaaaaaaaaaaaaaaaaaaaaaaaaaaaaaaaaaa

SEQ ID NO: 1262 - RNA, 1385 nt, Artificial Sequence
  mRNA product Design a-1 (hSL-A100) comprising derived and/or modified sequence from RVA/DS-1/P[4]__CAD62680.1__P2_VP8*(41-223)_Ferritin (opt1)
aggagagucccgcagucggcguccagcggcucugcuuguucgugugugugucguugcaggccuuauucaagcuuaccaugcaguacaucaaggcgaacagcaaguucaucggcaucaccgagcugggguccggcagcggggcccagacccgcuacgcgcccgugaacuggggcuccugggagaucaacgacagcacgaccgucgagccggugcucgacgggcccuaccagcccaccaccuucaagcccccgaacgacuacuggcugcugaucuccagcaacacgaacggcguggucuacgaguccaccaacaacaacgacuucuggaccgccgugagcuccguggagccccacgucagccagaccaaccggcaguacauccucuucggcgagaacaagcaguucaacguggagaacaacuccgacaaguggaaguucuucgagacguucaccgggagcucccagggcaacuucagcaaccgccggacccugaccuccagcaaccgccugguggggaugcucaaguacggcgggcgggucuggacguuccacggcgagacgccccgcgccaccaccgacuccagcaacaccgccgaccugaacaacaucuccaucaucauccacagcgaguucuacaucaucccccggagccaggaguccaagugcaacgaguacaucaacaacggccugagcgggggcgacaucaucaagcuccugaacgagcaggucaacaaggagaugcaguccagcaaccuguacauguccaugagcuccuggugcuacacccacagccucgacggggccggccuguuccuguucgaccacgcggccgaggaguacgagcacgccaagaagcucaucaucuuccugaacgagaacaacgugccggugcagcugaccuccaucagcgcccccgagcacaaguucgagggccucacccagaucuuccagaaggcguacgagcacgagcagcacaucuccgagagcaucaacaacaucguggaccacgccaucaaguccaaggaccacgccacguucaacuuccugcagugguacguggccgagcagcacgaggaggagguccuguucaaggacauccucgacaagaucgagcugaucgggaacgagaaccacggccuguaccucgccgaccaguacgugaaggggaucgccaagagccgcaaguccugaggacuagucccuguucccagagcccacuuuuuuuucuuuuuuugaaauaaaauagccugucuuucagaucucaaaggcucuuuucagagccaccaaaaaaaaaaaaaaaaaaaaaaaaaaaaaaaaaaaaaaaaaaaaaaaaaaaaaaaaaaaaaaaaaaaaaaaaaaaaaaaaaaaaaaaaaaaaaaaaaaaaa

SEQ ID NO: 1263 - RNA, 1385 nt, Artificial Sequence; identical to SEQ ID NO: 1262
  mRNA product Design a-1 (hSL-A100) comprising derived and/or modified sequence from RVA/DS-1/P[4]__ABV53252.1__P2_VP8*(41-223)_Ferritin (opt1)

SEQ ID NO: 1264 - RNA, 1385 nt, Artificial Sequence
  mRNA product Design a-1 (hSL-A100) comprising derived and/or modified sequence from RVA/F01322/P[6]__AFA51886.1__P2_VP8*(41-223)_Ferritin (opt1)
aggagagucccgcagucggcguccagcggcucugcuuguucgugugugugucguugcaggccuuauucaagcuuaccaugcaguacaucaaggccaacagcaaguucaucggcaucaccgagcugggguccggcagcggggcccagaccaacuacgcgcccgugacguggucccacggcgaggucaacgacagcaccaccaucgagccggugcucgacgggcccuaccagcccaccaacuucaagcccccgaacgacuacuggauccugcugaaccccacgaaccagcaggucgugcucgagggcaccaacaagaccgacaucuggguggcccugcugcucguggagcccaacgucaccaaccagucccgccaguacacgcuguucggcgagaccaagcagaucaccguggagaacaacaccaacaaguggaaguucuucgagauguuccggagcuccgugagcgccgaguuccagcacaagcgcacgcugaccuccgacaccaagcucgccggguucaugaaguucuacaacagcgucuggaccuuccacggcgagacgcccaacgccaccaccgacuacuccagcaccuccaaccuguucgagguggagacggugauccacgucgaguucuacaucaucccgcggagccaggaguccaagugcagcgaguacaucaacaccgggcuguccggcggggacaucaucaagcuccugaacgagcaggucaacaaggagaugcagagcuccaaccuguacaugagcaugagcuccuggugcuacacccacagccucgacggcgcgggccuguuccuguucgaccacgccgccgaggaguacgagcacgccaagaagcucaucaucuuccugaacgagaacaacgugcccgugcagcugaccuccaucagcgcgcccgagcacaaguucgaggggcucacgcagaucuuccagaaggccuacgagcacgagcagcacaucuccgagagcaucaacaacaucguggaccacgccaucaaguccaaggaccacgccaccuucaacuuccugcagugguacguggccgagcagcacgaggaggagguccuguucaaggacauccucgacaagaucgagcugaucggcaacgagaaccacgggcuguaccucgcggaccaguacgugaagggcaucgccaagagccgcaaguccugaggacuagucccuguucccagagcccacuuuuuuuucuuuuuuugaaauaaaauagccugucuuucagaucucaaaggcucuuuucagagccaccaaaaaaaaaaaaaaaaaaaaaaaaaaaaaaaaaaaaaaaaaaaaaaaaaaaaaaaaaaaaaaaaaaaaaaaaaaaaaaaaaaaaaaaaaaaaaaaaaaaaa

SEQ ID NO: 1265 - RNA, 1385 nt, Artificial Sequence
  mRNA product Design a-1 (hSL-A100) comprising derived and/or modified sequence from RVA/1076/P[6]__AAA47337.1__P2_VP8*(41-223)_Ferritin (opt1)
aggagagucccgcagucggcguccagcggcucugcuuguucgugugugugucguugcaggccuuauucaagcuuaccaugcaguacaucaaggccaacagcaaguucaucggcaucaccgagcugggguccggcagcggggcccagaccaacuacgcgcccgugacguggucccacggcgaggucaacgacagcaccaccaucgagccggugcucgacgggcccuaccagcccaccuccuucaagcccccgagcgacuacuggauccugcugaaccccacgaaccagcaggucgugcucgagggcaccaacaagaccgacaucuggguggcccugcugcucguggagcccaacgucaccaaccagucccgccaguacacgcuguucggcgagaccaagcagaucaccguggagaacaacaccaacaaguggaaguucuucgagauguuccggagcuccgugagcgccgaguuccagcacaagcgcacgcugaccuccgacaccaagcucgccggguuccugaaguucuacaacagcgucuggaccuucuacggcgagacgccccacgccaccaccgacuacuccagcaccuccaaccugagcgagguggagacggcgauccacguggaguucuacaucaucccgcggucccaggagagcaagugcaacgaguacaucaacaccgggcucuccggcggggacaucaucaagcugcugaacgagcaggucaacaaggagaugcagagcagcaaccucuacauguccaugagcuccuggugcuacacccacagccuggacggcgccggccuguuccucuucgaccacgccgccgaggaguacgagcacgcgaagaagcugaucaucuuccugaacgagaacaacgugcccgugcagcucaccuccaucagcgcccccgagcacaaguucgaggggcugacgcagaucuuccagaaggccuacgagcacgagcagcacaucuccgagagcaucaacaacaucgucgaccacgccaucaaguccaaggaccacgccaccuucaacuuccugcagugguacguggcggagcagcacgaggaggagguccucuucaaggacauccuggacaagaucgagcugaucggcaacgagaaccacgggcucuaccuggccgaccaguacgugaagggcaucgccaagagccgcaaguccugaggacuagucccuguucccagagcccacuuuuuuuucuuuuuuugaaauaaaauagccugucuuucagaucucaaaggcucuuuucagagccaccaaaaaaaaaaaaaaaaaaaaaaaaaaaaaaaaaaaaaaaaaaaaaaaaaaaaaaaaaaaaaaaaaaaaaaaaaaaaaaaaaaaaaaaaaaaaaaaaaaaaa

SEQ ID NO: 1266 - RNA, 1385 nt, Artificial Sequence
  mRNA product Design a-1 (hSL-A100) comprising derived and/or modified sequence from RVA/BE1128/P[8]__AEX30671.1__P2_VP8*(41-223)_Ferritin (opt1)
aggagagucccgcagucggcguccagcggcucugcuuguucgugugugugucguugcaggccuuauucaagcuuaccaugcaguacaucaaggccaacagcaaguucaucggcaucaccgagcugggguccggcagcggggcccagacccgcuacgcgcccgugaacuggggccacggggagaucaacgacuccacgaccgucgagccgauccucgacggccccuaccagcccaccaccuucacgcccccgaccgacuacuggauccugaucaccagcaacaccaacggcgugguguacgaguccacgaacaacagcgacuucuggaccgccgucaucgccguggagccccacgugaaccccgucgaccggcaguacaacguguucggggagaacaagcaguucaacgugcgcaacgacuccgacaaguggaaguuccuggagauguuccggggcagcucccagaacgacuucuacaaccgccggacccucaccagcgacacgcgccuggucgggauccugaaguacggcgggcggguguggaccuuccacggcgagacgccccgcgccaccaccgacuccagcaacaccgccaaccucgacggcaucuccaucaccauccacagcgaguucuacaucaucccgcggucccaggagagcaagugcaacgaguacaucaacaacgggcuguccggcggggacaucaucaagcugcucaacgagcaggucaacaaggagaugcagagcuccaaccuguacaugagcaugagcuccuggugcuacacccacagccuggacggcgcgggccucuuccuguucgaccacgccgccgaggaguacgagcacgccaagaagcugaucaucuuccucaacgagaacaacgugcccgugcagcugacguccaucagcgcgcccgagcacaaguucgaggggcugacccagaucuuccagaaggccuacgagcacgagcagcacaucuccgagagcaucaacaacaucguggaccacgccaucaaguccaaggaccacgccaccuucaacuuccuccagugguacgucgccgagcagcacgaggaggaggugcuguucaaggacauccuggacaagaucgagcucaucggcaacgagaaccacgggcuguaccuggcggaccaguacgugaagggcaucgccaagagccgcaaguccugaggacuagucccuguucccagagcccacuuuuuuuucuuuuuuugaaauaaaauagccugucuuucagaucucaaaggcucuuuucagagccaccaaaaaaaaaaaaaaaaaaaaaaaaaaaaaaaaaaaaaaaaaaaaaaaaaaaaaaaaaaaaaaaaaaaaaaaaaaaaaaaaaaaaaaaaaaaaaaaaaaaaa

SEQ ID NO: 1267 - RNA, 1385 nt, Artificial Sequence
  mRNA product Design a-1 (hSL-A100) comprising derived and/or modified sequence from RVA/Wa-VirWa/P[8]__ACR22783.1__P2_VP8*(41-223)_Ferritin (opt1)
aggagagucccgcagucggcguccagcggcucugcuuguucgugugugugucguugcaggccuuauucaagcuuaccaugcaguacaucaaggccaacagcaaguucaucggcaucaccgagcugggguccggcagcggggcccagacccgcuacgcgcccgugaacuggggccacggggagaucaacgacuccacgaccgucgagccgauccucgacggccccuaccagcccaccaccuucacgcccccgaacgacuacuggauccugaucaacagcaacaccaacggcgugguguacgaguccaccaacaacagcgacuucuggaccgccgucguggccaucgagccccacgugaaccccgucgaccggcaguacacgaucuucggggaguccaagcaguucaacgugcgcaacgacagcaacaaguggaaguuccuggagauguuccgguccagcucccagaacgaguucuacaaccgccggacccucaccagcgacacccgccuggugggcauccugaaguacgggggccgggucuggacguuccacggggagacgccccgcgccaccaccgacuccagcuccaccgccaaccucaacaacaucagcaucaccauccacuccgaguucuacaucaucccgcggagccaggaguccaagugcaacgaguacaucaacaacggccugagcggcggggacaucaucaagcugcucaacgagcaggucaacaaggagaugcagagcuccaaccuguacaugagcauguccagcuggugcuacacccacucccuggacggcgcgggccucuuccuguucgaccacgccgccgaggaguacgagcacgccaagaagcugaucaucuuccucaacgagaacaacgugcccgugcagcugaccagcaucuccgcgcccgagcacaaguucgaggggcugacgcagaucuuccagaaggccuacgagcacgagcagcacaucagcgaguccaucaacaacaucguggaccacgccaucaagagcaaggaccacgccaccuucaacuuccuccagugguacguggccgagcagcacgaggaggagguccuguucaaggacauccuggacaagaucgagcucaucggcaacgagaaccacgggcuguaccuggcggaccaguacgugaagggcaucgccaagucccgcaagagcugaggacuagucccuguucccagagcccacuuuuuuuucuuuuuuugaaauaaaauagccugucuuucagaucucaaaggcucuuuucagagccaccaaaaaaaaaaaaaaaaaaaaaaaaaaaaaaaaaaaaaaaaaaaaaaaaaaaaaaaaaaaaaaaaaaaaaaaaaaaaaaaaaaaaaaaaaaaaaaaaaaaaa

SEQ ID NO: 1268 - RNA, 1385 nt, Artificial Sequence
  mRNA product Design a-1 (hSL-A100) comprising derived and/or modified sequence from RVA/Wa/P[8]__AAA47290.1__P2_VP8*(41-223)_Ferritin (opt1)
aggagagucccgcagucggcguccagcggcucugcuuguucgugugugugucguugcaggccuuauucaagcuuaccaugcaguacaucaaggccaacagcaaguucaucggcaucaccgagcugggguccggcagcggggcccagacccgcuacgcgcccgugaacuggggccacggggagaucaacgacuccacgaccgucgagccgauccucgacggccccuaccagcccaccaccuucacgcccccgaacgacuacuggauccugaucaacagcaacaccaacggcgugguguacgaguccaccaacaacagcgacuucuggaccgccgucguggccaucgagccccacgugaaccccgucgaccggcaguacacgaucuucggggaguccaagcaguucaacgugagcaacgacuccaacaaguggaaguuccuggagauguuccgcagcuccagccagaacgaguucuacaaccggcgcacccucaccuccgacacccgguucgugggcauccugaaguacgggggccgcgucuggacguuccacggggagacgccccgggccaccaccgacagcuccagcaccgccaaccugaacaacaucuccaucaccauccacagcgaguucuacaucaucccgcgcucccaggagagcaagugcaacgaguacaucaacaacggccucagcggcggggacaucaucaagcugcugaacgagcaggucaacaaggagaugcaguccagcaaccucuacauguccaugagcuccuggugcuacacccacagccuggacggcgcggggcuguuccucuucgaccacgccgccgaggaguacgagcacgccaagaagcugaucaucuuccugaacgagaacaacgugcccgugcagcucaccuccaucagcgcgcccgagcacaaguucgagggccugacgcagaucuuccagaaggccuacgagcacgagcagcacaucuccgagagcaucaacaacaucguggaccacgccaucaaguccaaggaccacgccaccuucaacuuccugcagugguacguggccgagcagcacgaggaggagguccucuucaaggacauccuggacaagaucgagcugaucggcaacgagaaccacgggcucuaccuggcggaccaguacgugaagggcaucgccaagagccggaaguccugaggacuagucccuguucccagagcccacuuuuuuuucuuuuuuugaaauaaaauagccugucuuucagaucucaaaggcucuuuucagagccaccaaaaaaaaaaaaaaaaaaaaaaaaaaaaaaaaaaaaaaaaaaaaaaaaaaaaaaaaaaaaaaaaaaaaaaaaaaaaaaaaaaaaaaaaaaaaaaaaaaaaa

SEQ ID NO: 1269 - RNA, 1385 nt, Artificial Sequence
  mRNA product Design a-1 (hSL-A100) comprising derived and/or modified sequence from RVA/Wa/P[8]__AAA66953.1__P2_VP8*(41-223)_Ferritin (opt1)
aggagagucccgcagucggcguccagcggcucugcuuguucgugugugugucguugcaggccuuauucaagcuuaccaugcaguacaucaaggccaacagcaaguucaucggcaucaccgagcugggguccggcagcggggcccagacccgcuacgcgcccgugaacuggggccacggggagaucaacgacuccacgaccgucgagccgaugcucgacggccccuaccagcccaccaccuucacgcccccgaacgacuacuggauccugaucaacagcaacaccaacggcgugguguacgaguccaccaacaacagcgacuucuggaccgccgucguggccaucgagccccacgugaaccccgucgaccggcaguacacgaucuucggggaguccaagcaguucaacgugagcaacgacuccaacaaguggaaguuccuggagauguuccgcagcuccagccagaacgaguucuacaaccggcgcacccucaccuccgacacccgguucgugggcauccugaaguacgggggccgcgucuggacguuccacggggagacgccccgggccaccaccgacagcuccagcaccgccaaccugaacaacaucuccaucaccauccacagcgaguucuacaucaucccgcgcucccaggagagcaagugcaacgaguacaucaacaacggccucagcggcggggacaucaucaagcugcugaacgagcaggucaacaaggagaugcaguccagcaaccucuacauguccaugagcuccuggugcuacacccacagccuggacggcgcggggcuguuccucuucgaccacgccgccgaggaguacgagcacgccaagaagcugaucaucuuccugaacgagaacaacgugcccgugcagcucaccuccaucagcgcgcccgagcacaaguucgagggccugacgcagaucuuccagaaggccuacgagcacgagcagcacaucuccgagagcaucaacaacaucguggaccacgccaucaaguccaaggaccacgccaccuucaacuuccugcagugguacguggccgagcagcacgaggaggagguccucuucaaggacauccuggacaagaucgagcugaucggcaacgagaaccacgggcucuaccuggcggaccaguacgugaagggcaucgccaagagccggaaguccugaggacuagucccuguucccagagcccacuuuuuuuucuuuuuuugaaauaaaauagccugucuuucagaucucaaaggcucuuuucagagccaccaaaaaaaaaaaaaaaaaaaaaaaaaaaaaaaaaaaaaaaaaaaaaaaaaaaaaaaaaaaaaaaaaaaaaaaaaaaaaaaaaaaaaaaaaaaaaaaaaaaaa

SEQ ID NO: 1270 - RNA, 1319 nt, Artificial Sequence
  mRNA product Design a-1 (hSL-A100) comprising derived and/or modified sequence from RVA/BE1058/P[4]__AEX30665.1__LumSynt_P2_VP8*(65-223) (opt1)
aggagagucccgcagucggcguccagcggcucugcuuguucgugugugugucguugcaggccuuauucaagcuuaccaugcagaucuacgagggcaagcugaccgccgaggggcuccgcuucggcaucguggccagccgguucaaccacgcgcuggucgaccgccugguggagggggccaucgacgccaucgugcggcacggcgggcgcgaggaggacaucacccucguccgggugcccggcuccugggagaucccgguggccgccggcgagcuggcgcgcaaggaggacaucgacgccgucaucgccaucggggugcugauccggggcgccacgccccacuucgacuacaucgcgagcgagguguccaaggggcucgccgaccugagccuggagcuccgcaagcccaucaccuucggcgucaucaccgccgacacccuggagcaggccaucgagcgggccgggacgaagcacggcaacaagggcugggaggcggcccuguccgccaucgagauggccaaccucuucaagagccugcgcgggggcuccgggggcagcggcggguccggcgggagcggcgggggccaguacaucaaggccaacuccaaguucaucggcaucaccgagcuggggagcggcuccgggcucgacggccccuaccagccgaccaccuucaagccgcccaacgacuacuggcugcugaucagcuccaacacggacggggugguguacgagagcaccaacaacuccgacuucuggaccgcggucaucgccguggagccccacgugaaccagaccaaccggcaguacguccucuucggcgagaacaagcaguucaacaucgagaacagcuccgacaaguggaaguucuucgagauguucaagggcaacagccagagcgacuucuccaaccgccggacgcugaccagcuccaaccgccugguggggaugcucaaguacggcgggcggguguggaccuuccacggcgagacgccccgcgccaccaccgacagcuccagcaccgccgaccugaacaacaucuccaucaucauccacagcgaguucuacaucaucccccggucccaggagagcaagugcaacgaguacaucaacaacgggcugugaggacuagucccuguucccagagcccacuuuuuuuucuuuuuuugaaauaaaauagccugucuuucagaucucaaaggcucuuuucagagccaccaaaaaaaaaaaaaaaaaaaaaaaaaaaaaaaaaaaaaaaaaaaaaaaaaaaaaaaaaaaaaaaaaaaaaaaaaaaaaaaaaaaaaaaaaaaaaaaaaaaaa

SEQ ID NO: 1271 - RNA, 1319 nt, Artificial Sequence
  mRNA product Design a-1 (hSL-A100) comprising derived and/or modified sequence from RVA/DS-1/P[4]__CAD62680.1__LumSynt_P2_VP8*(65-223) (opt1)
aggagagucccgcagucggcguccagcggcucugcuuguucgugugugugucguugcaggccuuauucaagcuuaccaugcagaucuacgagggcaagcugaccgccgaggggcuccgcuucggcaucguggccagccgguucaaccacgcgcuggucgaccgccugguggagggggccaucgacgccaucgugcggcacggcgggcgcgaggaggacaucacccucguccgggugcccggcuccugggagaucccgguggccgccggcgagcuggcgcgcaaggaggacaucgacgccgucaucgccaucggggugcugauccggggcgccacgccccacuucgacuacaucgcgagcgagguguccaaggggcucgccgaccugagccuggagcuccgcaagcccaucaccuucggcgucaucaccgccgacacccuggagcaggccaucgagcgggccgggacgaagcacggcaacaagggcugggaggcggcccuguccgccaucgagauggccaaccucuucaagagccugcgcgggggcuccgggggcagcggcggguccggcgggagcggcgggggccaguacaucaaggccaacuccaaguucaucggcaucaccgagcuggggagcggcuccgggcucgacggccccuaccagccgaccaccuucaagccgcccaacgacuacuggcugcugaucagcuccaacacgaacggggugguguacgagagcaccaacaacaacgacuucuggaccgcggucuccagcguggagccccacgugucccagaccaaccggcaguacauccucuucggcgagaacaagcaguucaacgucgagaacaacagcgacaaguggaaguucuucgagacguucaccggcagcucccaggggaacuucagcaaccgccggacccugaccuccagcaaccgccuggugggcaugcucaaguacgggggccggguguggacguuccacggggagacgccccgcgccaccaccgacuccagcaacaccgccgaccugaacaacaucuccaucaucauccacagcgaguucuacaucaucccccggucccaggagagcaagugcaacgaguacaucaacaacggccugugaggacuagucccuguucccagagcccacuuuuuuuucuuuuuuugaaauaaaauagccugucuuucagaucucaaaggcucuuuucagagccaccaaaaaaaaaaaaaaaaaaaaaaaaaaaaaaaaaaaaaaaaaaaaaaaaaaaaaaaaaaaaaaaaaaaaaaaaaaaaaaaaaaaaaaaaaaaaaaaaaaaaa

SEQ ID NO: 1272 - RNA, 1319 nt, Artificial Sequence; identical to SEQ ID NO: 1271
  mRNA product Design a-1 (hSL-A100) comprising derived and/or modified sequence from RVA/DS-1/P[4]__ABV53252.1__LumSynt_P2_VP8*(65-223) (opt1)

SEQ ID NO: 1273 - RNA, 1319 nt, Artificial Sequence
  mRNA product Design a-1 (hSL-A100) comprising derived and/or modified sequence from RVA/F01322/P[6]__AFA51886.1__LumSynt_P2_VP8*(65-223) (opt1)
aggagagucccgcagucggcguccagcggcucugcuuguucgugugugugucguugcaggccuuauucaagcuuaccaugcagaucuacgagggcaagcugaccgccgaggggcuccgcuucggcaucguggccagccgguucaaccacgcgcuggucgaccgccugguggagggggccaucgacgccaucgugcggcacggcgggcgcgaggaggacaucacccucguccgggugcccggcuccugggagaucccgguggccgccggcgagcuggcgcgcaaggaggacaucgacgccgucaucgccaucggggugcugauccggggcgccacgccccacuucgacuacaucgcgagcgagguguccaaggggcucgccgaccugagccuggagcuccgcaagcccaucaccuucggcgucaucaccgccgacacccuggagcaggccaucgagcgggccgggacgaagcacggcaacaagggcugggaggcggcccuguccgccaucgagauggccaaccucuucaagagccugcgcgggggcuccgggggcagcggcggguccggcgggagcggcgggggccaguacaucaaggccaacuccaaguucaucggcaucaccgagcuggggagcggcuccgggcucgacggccccuaccagccgaccaacuucaagccgcccaacgacuacuggauccugcugaaccccaccaaccagcaggucgugcucgaggggacgaacaagaccgacaucuggguggcgcugcugcucguggagcccaacgugaccaaccagagccggcaguacacccuguucggcgagacgaagcagaucaccgucgagaacaacaccaacaaguggaaguucuucgagauguuccgcuccagcguguccgccgaguuccagcacaagcggacccugacgagcgacaccaagcucgccggcuucaugaaguucuacaacuccguguggaccuuccacggggagacccccaacgccacgaccgacuacagcagcaccuccaaccuguucgaggucgagaccgugauccacguggaguucuacaucaucccccgcagccaggaguccaagugcagcgaguacaucaacacgggccugugaggacuagucccuguucccagagcccacuuuuuuuucuuuuuuugaaauaaaauagccugucuuucagaucucaaaggcucuuuucagagccaccaaaaaaaaaaaaaaaaaaaaaaaaaaaaaaaaaaaaaaaaaaaaaaaaaaaaaaaaaaaaaaaaaaaaaaaaaaaaaaaaaaaaaaaaaaaaaaaaaaaaa

SEQ ID NO: 1274 - RNA, 1319 nt, Artificial Sequence
  mRNA product Design a-1 (hSL-A100) comprising derived and/or modified sequence from RVA/1076/P[6]__AAA47337.1__LumSynt_P2_VP8*(65-223) (opt1)
aggagagucccgcagucggcguccagcggcucugcuuguucgugugugugucguugcaggccuuauucaagcuuaccaugcagaucuacgagggcaagcugaccgccgaggggcuccgcuucggcaucguggccagccgguucaaccacgcgcuggucgaccgccugguggagggggccaucgacgccaucgugcggcacggcgggcgcgaggaggacaucacccucguccgggugcccggcuccugggagaucccgguggccgccggcgagcuggcgcgcaaggaggacaucgacgccgucaucgccaucggggugcugauccggggcgccacgccccacuucgacuacaucgcgagcgagguguccaaggggcucgccgaccugagccuggagcuccgcaagcccaucaccuucggcgucaucaccgccgacacccuggagcaggccaucgagcgggccgggacgaagcacggcaacaagggcugggaggcggcccuguccgccaucgagauggccaaccucuucaagagccugcgcgggggcuccgggggcagcggcggguccggcgggagcggcgggggccaguacaucaaggccaacuccaaguucaucggcaucaccgagcuggggagcggcuccgggcucgacggccccuaccagccgaccagcuucaagccgcccuccgacuacuggauccugcugaaccccaccaaccagcaggucgugcucgaggggacgaacaagaccgacaucuggguggcgcugcugcucguggagcccaacgugaccaaccagagccggcaguacacccuguucggcgagacgaagcagaucaccgucgagaacaacaccaacaaguggaaguucuucgagauguuccgcuccagcguguccgccgaguuccagcacaagcggacccugacgagcgacaccaagcucgccggcuuccugaaguucuacaacagcguguggaccuucuacggggagacgccccacgccaccaccgacuacuccagcaccuccaaccugagcgaggucgagaccgccauccacguggaguucuacaucaucccccgcucccaggagagcaagugcaacgaguacaucaacacgggccucugaggacuagucccuguucccagagcccacuuuuuuuucuuuuuuugaaauaaaauagccugucuuucagaucucaaaggcucuuuucagagccaccaaaaaaaaaaaaaaaaaaaaaaaaaaaaaaaaaaaaaaaaaaaaaaaaaaaaaaaaaaaaaaaaaaaaaaaaaaaaaaaaaaaaaaaaaaaaaaaaaaaaa

SEQ ID NO: 1275 - RNA, 1319 nt, Artificial Sequence
  mRNA product Design a-1 (hSL-A100) comprising derived and/or modified sequence from RVA/BE1128/P[8]__AEX30671.1__LumSynt_P2_VP8*(65-223) (opt1)
aggagagucccgcagucggcguccagcggcucugcuuguucgugugugugucguugcaggccuuauucaagcuuaccaugcagaucuacgagggcaagcugaccgccgaggggcuccgcuucggcaucguggccagccgguucaaccacgcgcuggucgaccgccugguggagggggccaucgacgccaucgugcggcacggcgggcgcgaggaggacaucacccucguccgggugcccggcuccugggagaucccgguggccgccggcgagcuggcgcgcaaggaggacaucgacgccgucaucgccaucggggugcugauccggggcgccacgccccacuucgacuacaucgcgagcgagguguccaaggggcucgccgaccugagccuggagcuccgcaagcccaucaccuucggcgucaucaccgccgacacccuggagcaggccaucgagcgggccgggacgaagcacggcaacaagggcugggaggcggcccuguccgccaucgagauggccaaccucuucaagagccugcgcgggggcuccgggggcagcggcggguccggcgggagcggcgggggccaguacaucaaggccaacuccaaguucaucggcaucaccgagcuggggagcggcuccgggcucgacggccccuaccagccgaccaccuucacgccgcccaccgacuacuggauccugaucaccagcaacaccaacggggugguguacgaguccacgaacaacagcgacuucuggaccgcggucaucgccguggagccccacgugaaccccgucgaccggcaguacaacguguucggcgagaacaagcaguucaacgugcgcaacgacuccgacaaguggaaguuccuggagauguuccggggcagcucccagaacgacuucuacaaccgccggacccucaccagcgacacgcgccuggucgggauccugaaguacggcgggcggguguggaccuuccacggcgagacgccccgcgccaccaccgacagcuccaacaccgccaaccucgacgggaucagcaucaccauccacuccgaguucuacaucaucccccggagccaggaguccaagugcaacgaguacaucaacaacggccugugaggacuagucccuguucccagagcccacuuuuuuuucuuuuuuugaaauaaaauagccugucuuucagaucucaaaggcucuuuucagagccaccaaaaaaaaaaaaaaaaaaaaaaaaaaaaaaaaaaaaaaaaaaaaaaaaaaaaaaaaaaaaaaaaaaaaaaaaaaaaaaaaaaaaaaaaaaaaaaaaaaaaa

SEQ ID NO: 1276 - RNA, 1319 nt, Artificial Sequence
  mRNA product Design a-1 (hSL-A100) comprising derived and/or modified sequence from RVA/Wa-VirWa/P[8]__ACR22783.1__LumSynt_P2_VP8*(65-223) (opt1)
aggagagucccgcagucggcguccagcggcucugcuuguucgugugugugucguugcaggccuuauucaagcuuaccaugcagaucuacgagggcaagcugaccgccgaggggcuccgcuucggcaucguggccagccgguucaaccacgcgcuggucgaccgccugguggagggggccaucgacgccaucgugcggcacggcgggcgcgaggaggacaucacccucguccgggugcccggcuccugggagaucccgguggccgccggcgagcuggcgcgcaaggaggacaucgacgccgucaucgccaucggggugcugauccggggcgccacgccccacuucgacuacaucgcgagcgagguguccaaggggcucgccgaccugagccuggagcuccgcaagcccaucaccuucggcgucaucaccgccgacacccuggagcaggccaucgagcgggccgggacgaagcacggcaacaagggcugggaggcggcccuguccgccaucgagauggccaaccucuucaagagccugcgcgggggcuccgggggcagcggcggguccggcgggagcggcgggggccaguacaucaaggccaacuccaaguucaucggcaucaccgagcuggggagcggcuccgggcucgacggccccuaccagccgaccaccuucacgccgcccaacgacuacuggauccugaucaacagcaacaccaacggggugguguacgaguccaccaacaacagcgacuucuggaccgcggucguggccaucgagccccacgugaaccccgucgaccggcaguacacgaucuucggcgaguccaagcaguucaacgugcgcaacgacagcaacaaguggaaguuccuggagauguuccgguccagcagccagaacgaguucuacaaccgccggacccucaccuccgacacccgccuggugggcauccugaaguacgggggccgggucuggacguuccacggggagacgccccgcgccaccaccgacagcuccagcaccgccaaccucaacaacaucuccaucaccauccacagcgaguucuacaucaucccccggucccaggagagcaagugcaacgaguacaucaacaacggccugugaggacuagucccuguucccagagcccacuuuuuuuucuuuuuuugaaauaaaauagccugucuuucagaucucaaaggcucuuuucagagccaccaaaaaaaaaaaaaaaaaaaaaaaaaaaaaaaaaaaaaaaaaaaaaaaaaaaaaaaaaaaaaaaaaaaaaaaaaaaaaaaaaaaaaaaaaaaaaaaaaaaaa

SEQ ID NO: 1277 - RNA, 1319 nt, Artificial Sequence
  mRNA product Design a-1 (hSL-A100) comprising derived and/or modified sequence from RVA/Wa/P[8]__AAA47290.1__LumSynt_P2_VP8*(65-223) (opt1)
aggagagucccgcagucggcguccagcggcucugcuuguucgugugugugucguugcaggccuuauucaagcuuaccaugcagaucuacgagggcaagcugaccgccgaggggcuccgcuucggcaucguggccagccgguucaaccacgcgcuggucgaccgccugguggagggggccaucgacgccaucgugcggcacggcgggcgcgaggaggacaucacccucguccgggugcccggcuccugggagaucccgguggccgccggcgagcuggcgcgcaaggaggacaucgacgccgucaucgccaucggggugcugauccggggcgccacgccccacuucgacuacaucgcgagcgagguguccaaggggcucgccgaccugagccuggagcuccgcaagcccaucaccuucggcgucaucaccgccgacacccuggagcaggccaucgagcgggccgggacgaagcacggcaacaagggcugggaggcggcccuguccgccaucgagauggccaaccucuucaagagccugcgcgggggcuccgggggcagcggcggguccggcgggagcggcgggggccaguacaucaaggccaacuccaaguucaucggcaucaccgagcuggggagcggcuccgggcucgacggccccuaccagccgaccaccuucacgccgcccaacgacuacuggauccugaucaacagcaacaccaacggggugguguacgaguccaccaacaacagcgacuucuggaccgcggucguggccaucgagccccacgugaaccccgucgaccggcaguacacgaucuucggcgaguccaagcaguucaacgugagcaacgacuccaacaaguggaaguuccuggagauguuccgcagcagcucccagaacgaguucuacaaccggcgcacccucaccagcgacacccgguucgugggcauccugaaguacgggggccgcgucuggacguuccacggggagacgccccgggccaccaccgacuccagcuccaccgccaaccugaacaacaucagcaucaccauccacuccgaguucuacaucaucccccgcagccaggaguccaagugcaacgaguacaucaacaacggccucugaggacuagucccuguucccagagcccacuuuuuuuucuuuuuuugaaauaaaauagccugucuuucagaucucaaaggcucuuuucagagccaccaaaaaaaaaaaaaaaaaaaaaaaaaaaaaaaaaaaaaaaaaaaaaaaaaaaaaaaaaaaaaaaaaaaaaaaaaaaaaaaaaaaaaaaaaaaaaaaaaaaaa

SEQ ID NO: 1278 - RNA, 1319 nt, Artificial Sequence; identical to SEQ ID NO: 1277
  mRNA product Design a-1 (hSL-A100) comprising derived and/or modified sequence from RVA/Wa/P[8]__AAA66953.1__LumSynt_P2_VP8*(65-223) (opt1)

SEQ ID NO: 1279 - RNA, 1391 nt, Artificial Sequence
  mRNA product Design a-1 (hSL-A100) comprising derived and/or modified sequence from RVA/BE1058/P[4]__AEX30665.1__LumSynt_P2_VP8*(41-223) (opt1)
aggagagucccgcagucggcguccagcggcucugcuuguucgugugugugucguugcaggccuuauucaagcuuaccaugcagaucuacgagggcaagcugaccgccgaggggcuccgcuucggcaucguggccagccgguucaaccacgcgcuggucgaccgccugguggagggggccaucgacgccaucgugcggcacggcgggcgcgaggaggacaucacccucguccgggugcccggcuccugggagaucccgguggccgccggcgagcuggcgcgcaaggaggacaucgacgccgucaucgccaucggggugcugauccggggcgccacgccccacuucgacuacaucgcgagcgagguguccaaggggcucgccgaccugagccuggagcuccgcaagcccaucaccuucggcgucaucaccgccgacacccuggagcaggccaucgagcgggccgggacgaagcacggcaacaagggcugggaggcggcccuguccgccaucgagauggccaaccucuucaagagccugcgcgggggcuccgggggcagcggcggguccggcgggagcggcgggggccaguacaucaaggccaacuccaaguucaucggcaucaccgagcuggggagcggcuccggggcgcagacccgguacgcccccgugaacuggggccacggggagaucaacgacagcaccacgguggagccgguccucgacggccccuaccagcccaccaccuucaagcccccgaacgacuacuggcugcugaucuccagcaacaccgacggcgugguguacgaguccacgaacaacagcgacuucuggaccgccgucaucgccguggagccccacgugaaccagaccaaccgccaguacguccucuucggggagaacaagcaguucaacaucgagaacuccagcgacaaguggaaguucuucgagauguucaagggcaacagccaguccgacuucagcaaccggcgcacccugacguccagcaaccggcugguggggaugcucaaguacggcgggcgcguguggaccuuccacggcgagacgccccgggccaccaccgacuccagcuccaccgcggaccugaacaacaucagcaucaucauccacuccgaguucuacaucaucccccgcagccaggaguccaagugcaacgaguacaucaacaacggccugugaggacuagucccuguucccagagcccacuuuuuuuucuuuuuuugaaauaaaauagccugucuuucagaucucaaaggcucuuuucagagccaccaaaaaaaaaaaaaaaaaaaaaaaaaaaaaaaaaaaaaaaaaaaaaaaaaaaaaaaaaaaaaaaaaaaaaaaaaaaaaaaaaaaaaaaaaaaaaaaaaaaaa

SEQ ID NO: 1280 - RNA, 1391 nt, Artificial Sequence
  mRNA product Design a-1 (hSL-A100) comprising derived and/or modified sequence from RVA/DS-1/P[4]__CAD62680.1__LumSynt_P2_VP8*(41-223) (opt1)
aggagagucccgcagucggcguccagcggcucugcuuguucgugugugugucguugcaggccuuauucaagcuuaccaugcagaucuacgagggcaagcugaccgccgaggggcuccgcuucggcaucguggccagccgguucaaccacgcgcuggucgaccgccugguggagggggccaucgacgccaucgugcggcacggcgggcgcgaggaggacaucacccucguccgggugcccggcuccugggagaucccgguggccgccggcgagcuggcgcgcaaggaggacaucgacgccgucaucgccaucggggugcugauccggggcgccacgccccacuucgacuacaucgcgagcgagguguccaaggggcucgccgaccugagccuggagcuccgcaagcccaucaccuucggcgucaucaccgccgacacccuggagcaggccaucgagcgggccgggacgaagcacggcaacaagggcugggaggcggcccuguccgccaucgagauggccaaccucuucaagagccugcgcgggggcuccgggggcagcggcggguccggcgggagcggcgggggccaguacaucaaggccaacuccaaguucaucggcaucaccgagcuggggagcggcuccggggcgcagacccgguacgcccccgugaacuggggcagcugggagaucaacgacuccaccacgguggagccgguccucgacgggcccuaccagcccaccaccuucaagcccccgaacgacuacuggcugcugaucagcuccaacaccaacggcgugguguacgagagcacgaacaacaacgacuucuggaccgccgucuccagcguggagccccacgugagccagaccaaccgccaguacauccucuucggcgagaacaagcaguucaacgucgagaacaacuccgacaaguggaaguucuucgagaccuucacggggagcucccagggcaacuucagcaaccggcgcacccugaccuccagcaaccggcugguggggaugcucaaguacggcgggcgcguguggaccuuccacggcgagacgccccgggccaccaccgacuccagcaacaccgccgaccugaacaacaucuccaucaucauccacagcgaguucuacaucaucccccgcucccaggagagcaagugcaacgaguacaucaacaacggccugugaggacuagucccuguucccagagcccacuuuuuuuucuuuuuuugaaauaaaauagccugucuuucagaucucaaaggcucuuuucagagccaccaaaaaaaaaaaaaaaaaaaaaaaaaaaaaaaaaaaaaaaaaaaaaaaaaaaaaaaaaaaaaaaaaaaaaaaaaaaaaaaaaaaaaaaaaaaaaaaaaaaaa

SEQ ID NO: 1281 - RNA, 1391 nt, Artificial Sequence; identical to SEQ ID NO: 1280
  mRNA product Design a-1 (hSL-A100) comprising derived and/or modified sequence from RVA/DS-1/P[4]__ABV53252.1__LumSynt_P2_VP8*(41-223) (opt1)

SEQ ID NO: 1282 - RNA, 1391 nt, Artificial Sequence
  mRNA product Design a-1 (hSL-A100) comprising derived and/or modified sequence from RVA/F01322/P[6]__AFA51886.1__LumSynt_P2_VP8*(41-223) (opt1)
aggagagucccgcagucggcguccagcggcucugcuuguucgugugugugucguugcaggccuuauucaagcuuaccaugcagaucuacgagggcaagcugaccgccgaggggcuccgcuucggcaucguggccagccgguucaaccacgcgcuggucgaccgccugguggagggggccaucgacgccaucgugcggcacggcgggcgcgaggaggacaucacccucguccgggugcccggcuccugggagaucccgguggccgccggcgagcuggcgcgcaaggaggacaucgacgccgucaucgccaucggggugcugauccggggcgccacgccccacuucgacuacaucgcgagcgagguguccaaggggcucgccgaccugagccuggagcuccgcaagcccaucaccuucggcgucaucaccgccgacacccuggagcaggccaucgagcgggccgggacgaagcacggcaacaagggcugggaggcggcccuguccgccaucgagauggccaaccucuucaagagccugcgcgggggcuccgggggcagcggcggguccggcgggagcggcgggggccaguacaucaaggccaacuccaaguucaucggcaucaccgagcuggggagcggcuccggggcgcagaccaacuacgcccccgugaccuggagccacggcgaggugaacgacuccacgaccaucgagccgguccucgacgggcccuaccagcccaccaacuucaagcccccgaacgacuacuggauccugcugaaccccaccaaccagcaggucgugcucgagggcacgaacaagaccgacaucuggguggcccugcugcucguggagcccaacgugaccaaccagagccggcaguacacccuguucggcgagacgaagcagaucaccgucgagaacaacaccaacaaguggaaguucuucgagauguuccgcuccagcguguccgccgaguuccagcacaagcggacccugacgagcgacaccaagcucgccggguucaugaaguucuacaacagcguguggaccuuccacggcgagacccccaacgcgacgaccgacuacuccagcaccuccaaccuguucgaggucgagaccgugauccacguggaguucuacaucaucccgcgcagccaggaguccaagugcagcgaguacaucaacacggggcugugaggacuagucccuguucccagagcccacuuuuuuuucuuuuuuugaaauaaaauagccugucuuucagaucucaaaggcucuuuucagagccaccaaaaaaaaaaaaaaaaaaaaaaaaaaaaaaaaaaaaaaaaaaaaaaaaaaaaaaaaaaaaaaaaaaaaaaaaaaaaaaaaaaaaaaaaaaaaaaaaaaaaa

SEQ ID NO: 1283 - RNA, 1391 nt, Artificial Sequence
  mRNA product Design a-1 (hSL-A100) comprising derived and/or modified sequence from RVA/1076/P[6]__AAA47337.1__LumSynt_P2_VP8*(41-223) (opt1)
aggagagucccgcagucggcguccagcggcucugcuuguucgugugugugucguugcaggccuuauucaagcuuaccaugcagaucuacgagggcaagcugaccgccgaggggcuccgcuucggcaucguggccagccgguucaaccacgcgcuggucgaccgccugguggagggggccaucgacgccaucgugcggcacggcgggcgcgaggaggacaucacccucguccgggugcccggcuccugggagaucccgguggccgccggcgagcuggcgcgcaaggaggacaucgacgccgucaucgccaucggggugcugauccggggcgccacgccccacuucgacuacaucgcgagcgagguguccaaggggcucgccgaccugagccuggagcuccgcaagcccaucaccuucggcgucaucaccgccgacacccuggagcaggccaucgagcgggccgggacgaagcacggcaacaagggcugggaggcggcccuguccgccaucgagauggccaaccucuucaagagccugcgcgggggcuccgggggcagcggcggguccggcgggagcggcgggggccaguacaucaaggccaacuccaaguucaucggcaucaccgagcuggggagcggcuccggggcgcagaccaacuacgcccccgugaccuggagccacggcgaggugaacgacuccacgaccaucgagccgguccucgacgggcccuaccagcccaccagcuucaagcccccguccgacuacuggauccugcugaaccccaccaaccagcaggucgugcucgagggcacgaacaagaccgacaucuggguggcccugcugcucguggagcccaacgugaccaaccagagccggcaguacacccuguucggcgagacgaagcagaucaccgucgagaacaacaccaacaaguggaaguucuucgagauguuccgcuccagcgugagcgccgaguuccagcacaagcggacccugacguccgacaccaagcucgccggguuccugaaguucuacaacagcguguggaccuucuacggcgagacgccccacgcgaccaccgacuacuccagcaccuccaaccugagcgaggucgagaccgccauccacguggaguucuacaucaucccgcgcucccaggagagcaagugcaacgaguacaucaacacggggcucugaggacuagucccuguucccagagcccacuuuuuuuucuuuuuuugaaauaaaauagccugucuuucagaucucaaaggcucuuuucagagccaccaaaaaaaaaaaaaaaaaaaaaaaaaaaaaaaaaaaaaaaaaaaaaaaaaaaaaaaaaaaaaaaaaaaaaaaaaaaaaaaaaaaaaaaaaaaaaaaaaaaaa

SEQ ID NO: 1284 - RNA, 1391 nt, Artificial Sequence
  mRNA product Design a-1 (hSL-A100) comprising derived and/or modified sequence from RVA/BE1128/P[8]__AEX30671.1__LumSynt_P2_VP8*(41-223) (opt1)
aggagagucccgcagucggcguccagcggcucugcuuguucgugugugugucguugcaggccuuauucaagcuuaccaugcagaucuacgagggcaagcugaccgccgaggggcuccgcuucggcaucguggccagccgguucaaccacgcgcuggucgaccgccugguggagggggccaucgacgccaucgugcggcacggcgggcgcgaggaggacaucacccucguccgggugcccggcuccugggagaucccgguggccgccggcgagcuggcgcgcaaggaggacaucgacgccgucaucgccaucggggugcugauccggggcgccacgccccacuucgacuacaucgcgagcgagguguccaaggggcucgccgaccugagccuggagcuccgcaagcccaucaccuucggcgucaucaccgccgacacccuggagcaggccaucgagcgggccgggacgaagcacggcaacaagggcugggaggcggcccuguccgccaucgagauggccaaccucuucaagagccugcgcgggggcuccgggggcagcggcggguccggcgggagcggcgggggccaguacaucaaggccaacuccaaguucaucggcaucaccgagcuggggagcggcuccggggcgcagacccgguacgcccccgugaacuggggccacggggagaucaacgacagcaccacgguggagccgauccucgacggccccuaccagcccaccaccuucacgcccccgaccgacuacuggauccugaucaccuccaacaccaacggcgucguguacgagagcaccaacaacuccgacuucuggacggccgugaucgccgucgagccccacgugaaccccguggaccgccaguacaacgucuucggggagaacaagcaguucaacgugcggaacgacagcgacaaguggaaguuccuggagauguuccgcggcuccagccagaacgacuucuacaaccggcgcacccucaccagcgacacccggcugguggggauccugaaguacggcgggcgcgucuggacguuccacggcgagacgccccgggccaccaccgacuccagcaacaccgcgaaccucgacggcaucuccaucaccauccacagcgaguucuacaucaucccgcgcucccaggagagcaagugcaacgaguacaucaacaacgggcugugaggacuagucccuguucccagagcccacuuuuuuuucuuuuuuugaaauaaaauagccugucuuucagaucucaaaggcucuuuucagagccaccaaaaaaaaaaaaaaaaaaaaaaaaaaaaaaaaaaaaaaaaaaaaaaaaaaaaaaaaaaaaaaaaaaaaaaaaaaaaaaaaaaaaaaaaaaaaaaaaaaaaa

SEQ ID NO: 1285 - RNA, 1391 nt, Artificial Sequence
  mRNA product Design a-1 (hSL-A100) comprising derived and/or modified sequence from RVA/Wa-VirWa/P[8]__ACR22783.1__LumSynt_P2_VP8*(41-223) (opt1)
aggagagucccgcagucggcguccagcggcucugcuuguucgugugugugucguugcaggccuuauucaagcuuaccaugcagaucuacgagggcaagcugaccgccgaggggcuccgcuucggcaucguggccagccgguucaaccacgcgcuggucgaccgccugguggagggggccaucgacgccaucgugcggcacggcgggcgcgaggaggacaucacccucguccgggugcccggcuccugggagaucccgguggccgccggcgagcuggcgcgcaaggaggacaucgacgccgucaucgccaucggggugcugauccggggcgccacgccccacuucgacuacaucgcgagcgagguguccaaggggcucgccgaccugagccuggagcuccgcaagcccaucaccuucggcgucaucaccgccgacacccuggagcaggccaucgagcgggccgggacgaagcacggcaacaagggcugggaggcggcccuguccgccaucgagauggccaaccucuucaagagccugcgcgggggcuccgggggcagcggcggguccggcgggagcggcgggggccaguacaucaaggccaacuccaaguucaucggcaucaccgagcuggggagcggcuccggggcgcagacccgguacgcccccgugaacuggggccacggggagaucaacgacagcaccacgguggagccgauccucgacggccccuaccagcccaccaccuucacgcccccgaacgacuacuggauccugaucaacuccaacaccaacggcgucguguacgagagcaccaacaacuccgacuucuggaccgccguggucgccaucgagccccacgugaaccccguggaccgccaguacaccaucuucggggagagcaagcaguucaacguccggaacgacuccaacaaguggaaguuccuggagauguuccgcagcagcucccagaacgaguucuacaaccggcgcacgcucaccagcgacacccggcuggugggcauccugaaguacgggggccgcguguggaccuuccacggggagacgccccgggccaccaccgacuccagcuccaccgcgaaccucaacaacaucagcaucacgauccacuccgaguucuacaucaucccgcgcagccaggaguccaagugcaacgaguacaucaacaacggccugugaggacuagucccuguucccagagcccacuuuuuuuucuuuuuuugaaauaaaauagccugucuuucagaucucaaaggcucuuuucagagccaccaaaaaaaaaaaaaaaaaaaaaaaaaaaaaaaaaaaaaaaaaaaaaaaaaaaaaaaaaaaaaaaaaaaaaaaaaaaaaaaaaaaaaaaaaaaaaaaaaaaaa

SEQ ID NO: 1286 - RNA, 1391 nt, Artificial Sequence
  mRNA product Design a-1 (hSL-A100) comprising derived and/or modified sequence from RVA/Wa/P[8]__AAA47290.1__LumSynt_P2_VP8*(41-223) (opt1)
aggagagucccgcagucggcguccagcggcucugcuuguucgugugugugucguugcaggccuuauucaagcuuaccaugcagaucuacgagggcaagcugaccgccgaggggcuccgcuucggcaucguggccagccgguucaaccacgcgcuggucgaccgccugguggagggggccaucgacgccaucgugcggcacggcgggcgcgaggaggacaucacccucguccgggugcccggcuccugggagaucccgguggccgccggcgagcuggcgcgcaaggaggacaucgacgccgucaucgccaucggggugcugauccggggcgccacgccccacuucgacuacaucgcgagcgagguguccaaggggcucgccgaccugagccuggagcuccgcaagcccaucaccuucggcgucaucaccgccgacacccuggagcaggccaucgagcgggccgggacgaagcacggcaacaagggcugggaggcggcccuguccgccaucgagauggccaaccucuucaagagccugcgcgggggcuccgggggcagcggcggguccggcgggagcggcgggggccaguacaucaaggccaacuccaaguucaucggcaucaccgagcuggggagcggcuccggggcgcagacccgguacgcccccgugaacuggggccacggggagaucaacgacagcaccacgguggagccgauccucgacggccccuaccagcccaccaccuucacgcccccgaacgacuacuggauccugaucaacuccaacaccaacggcgucguguacgagagcaccaacaacuccgacuucuggaccgccguggucgccaucgagccccacgugaaccccguggaccgccaguacaccaucuucggggagagcaagcaguucaacgucuccaacgacagcaacaaguggaaguuccuggagauguuccggagcuccagccagaacgaguucuacaaccgccggacgcucaccuccgacacccgcuucgugggcauccugaaguacgggggccggguguggaccuuccacggggagacgccccgcgccaccaccgacagcuccagcaccgcgaaccugaacaacaucuccaucacgauccacagcgaguucuacaucaucccgcggucccaggagagcaagugcaacgaguacaucaacaacggccucugaggacuagucccuguucccagagcccacuuuuuuuucuuuuuuugaaauaaaauagccugucuuucagaucucaaaggcucuuuucagagccaccaaaaaaaaaaaaaaaaaaaaaaaaaaaaaaaaaaaaaaaaaaaaaaaaaaaaaaaaaaaaaaaaaaaaaaaaaaaaaaaaaaaaaaaaaaaaaaaaaaaaa

SEQ ID NO: 1287 - RNA, 1391 nt, Artificial Sequence
  mRNA product Design a-1 (hSL-A100) comprising derived and/or modified sequence from RVA/Wa/P[8]__AAA66953.1__LumSynt_P2_VP8*(41-223) (opt1)
aggagagucccgcagucggcguccagcggcucugcuuguucgugugugugucguugcaggccuuauucaagcuuaccaugcagaucuacgagggcaagcugaccgccgaggggcuccgcuucggcaucguggccagccgguucaaccacgcgcuggucgaccgccugguggagggggccaucgacgccaucgugcggcacggcgggcgcgaggaggacaucacccucguccgggugcccggcuccugggagaucccgguggccgccggcgagcuggcgcgcaaggaggacaucgacgccgucaucgccaucggggugcugauccggggcgccacgccccacuucgacuacaucgcgagcgagguguccaaggggcucgccgaccugagccuggagcuccgcaagcccaucaccuucggcgucaucaccgccgacacccuggagcaggccaucgagcgggccgggacgaagcacggcaacaagggcugggaggcggcccuguccgccaucgagauggccaaccucuucaagagccugcgcgggggcuccgggggcagcggcggguccggcgggagcggcgggggccaguacaucaaggccaacuccaaguucaucggcaucaccgagcuggggagcggcuccggggcgcagacccgguacgcccccgugaacuggggccacggggagaucaacgacagcaccacgguggagccgaugcucgacggccccuaccagcccaccaccuucacgcccccgaacgacuacuggauccugaucaacuccaacaccaacggcgucguguacgagagcaccaacaacuccgacuucuggaccgccguggucgccaucgagccccacgugaaccccguggaccgccaguacaccaucuucggggagagcaagcaguucaacgucuccaacgacagcaacaaguggaaguuccuggagauguuccggagcuccagccagaacgaguucuacaaccgccggacgcucaccuccgacacccgcuucgugggcauccugaaguacgggggccggguguggaccuuccacggggagacgccccgcgccaccaccgacagcuccagcaccgcgaaccugaacaacaucuccaucacgauccacagcgaguucuacaucaucccgcggucccaggagagcaagugcaacgaguacaucaacaacggccucugaggacuagucccuguucccagagcccacuuuuuuuucuuuuuuugaaauaaaauagccugucuuucagaucucaaaggcucuuuucagagccaccaaaaaaaaaaaaaaaaaaaaaaaaaaaaaaaaaaaaaaaaaaaaaaaaaaaaaaaaaaaaaaaaaaaaaaaaaaaaaaaaaaaaaaaaaaaaaaaaaaaaa

SEQ ID NO: 1288 - RNA, 866 nt, Artificial Sequence
  mRNA product Design a-1 (hSL-A100) comprising derived and/or modified sequence from RVA/BE1058/P[4]__AEX30665.1__SP-IgE_P2_VP8*(65-223) (opt1)
aggagagucccgcagucggcguccagcggcucugcuuguucgugugugugucguugcaggccuuauucaagcuuaccauggacuggaccuggauccuguuccucguggccgccgcgacccgcguccacagccaguacaucaaggccaacuccaaguucaucggcaucacggagcuggggagcggcuccgggcuggacggccccuaccagccgaccaccuucaagccgcccaacgacuacuggcuccugaucagcuccaacaccgacggggugguguacgagagcacgaacaacuccgacuucuggaccgccgucaucgccguggagccccacgugaaccagaccaaccggcaguacguccuguucggcgagaacaagcaguucaacaucgagaacagcuccgacaaguggaaguucuucgagauguucaagggcaacagccaguccgacuucagcaaccgccggacccucacguccagcaaccgccugguggggaugcugaaguacggcgggcggguguggaccuuccacggcgagacgccccgcgccaccaccgacuccagcuccaccgcggaccucaacaacaucagcaucaucauccacuccgaguucuacaucaucccccggagccaggagagcaagugcaacgaguacaucaacaacgggcugugaggacuagucccuguucccagagcccacuuuuuuuucuuuuuuugaaauaaaauagccugucuuucagaucucaaaggcucuuuucagagccaccaaaaaaaaaaaaaaaaaaaaaaaaaaaaaaaaaaaaaaaaaaaaaaaaaaaaaaaaaaaaaaaaaaaaaaaaaaaaaaaaaaaaaaaaaaaaaaaaaaaaa

SEQ ID NO: 1289 - RNA, 866 nt, Artificial Sequence
  mRNA product Design a-1 (hSL-A100) comprising derived and/or modified sequence from RVA/DS-1/P[4]__CAD62680.1__SP-IgE_P2_VP8*(65-223) (opt1)
aggagagucccgcagucggcguccagcggcucugcuuguucgugugugugucguugcaggccuuauucaagcuuaccauggacuggaccuggauccuguuccucguggccgccgcgacccgcguccacagccaguacaucaaggccaacuccaaguucaucggcaucacggagcuggggagcggcuccgggcuggacggccccuaccagccgaccaccuucaagccgcccaacgacuacuggcuccugaucagcuccaacaccaacggggugguguacgagagcacgaacaacaacgacuucuggaccgccgucuccagcguggagccccacgugucccagaccaaccggcaguacauccuguucggcgagaacaagcaguucaacgucgagaacaacagcgacaaguggaaguucuucgagaccuucacgggcuccagccaggggaacuucuccaaccgccggacccucaccagcuccaaccgccuggugggcaugcugaaguacgggggccggguguggaccuuccacggggagacgccccgcgccaccaccgacagcuccaacaccgccgaccucaacaacaucagcaucaucauccacuccgaguucuacaucaucccccggagccaggagagcaagugcaacgaguacaucaacaacggccugugaggacuagucccuguucccagagcccacuuuuuuuucuuuuuuugaaauaaaauagccugucuuucagaucucaaaggcucuuuucagagccaccaaaaaaaaaaaaaaaaaaaaaaaaaaaaaaaaaaaaaaaaaaaaaaaaaaaaaaaaaaaaaaaaaaaaaaaaaaaaaaaaaaaaaaaaaaaaaaaaaaaaa

SEQ ID NO: 1290 - RNA, 866 nt, Artificial Sequence; identical to SEQ ID NO: 1289
  mRNA product Design a-1 (hSL-A100) comprising derived and/or modified sequence from RVA/DS-1/P[4]__ABV53252.1__SP-IgE_P2_VP8*(65-223) (opt1)

SEQ ID NO: 1291 - RNA, 866 nt, Artificial Sequence
  mRNA product Design a-1 (hSL-A100) comprising derived and/or modified sequence from RVA/F01322/P[6]__AFA51886.1__SP-IgE_P2_VP8*(65-223) (opt1)
aggagagucccgcagucggcguccagcggcucugcuuguucgugugugugucguugcaggccuuauucaagcuuaccauggacuggaccuggauccuguuccucguggccgccgcgacccgcguccacagccaguacaucaaggccaacuccaaguucaucggcaucacggagcuggggagcggcuccgggcuggacggccccuaccagccgaccaacuucaagccgcccaacgacuacuggauccuccugaaccccaccaaccagcaggucgugcuggaggggaccaacaagacggacaucuggguggcccuccugcugguggagcccaacgugaccaaccagagccggcaguacacccucuucggcgagaccaagcagaucacggucgagaacaacaccaacaaguggaaguucuucgagauguuccgcuccagcguguccgccgaguuccagcacaagcggacccugaccagcgacacgaagcuggccggcuucaugaaguucuacaacuccguguggaccuuccacggggagacccccaacgcgaccacggacuacagcuccaccagcaaccucuucgaggucgagaccgugauccacguggaguucuacaucaucccccgcucccaggagagcaagugcuccgaguacaucaacaccggccugugaggacuagucccuguucccagagcccacuuuuuuuucuuuuuuugaaauaaaauagccugucuuucagaucucaaaggcucuuuucagagccaccaaaaaaaaaaaaaaaaaaaaaaaaaaaaaaaaaaaaaaaaaaaaaaaaaaaaaaaaaaaaaaaaaaaaaaaaaaaaaaaaaaaaaaaaaaaaaaaaaaaaa

SEQ ID NO: 1292 - RNA, 866 nt, Artificial Sequence
  mRNA product Design a-1 (hSL-A100) comprising derived and/or modified sequence from RVA/1076/P[6]__AAA47337.1__SP-IgE_P2_VP8*(65-223) (opt1)
aggagagucccgcagucggcguccagcggcucugcuuguucgugugugugucguugcaggccuuauucaagcuuaccauggacuggaccuggauccuguuccucguggccgccgcgacccgcguccacagccaguacaucaaggccaacuccaaguucaucggcaucacggagcuggggagcggcuccgggcuggacggccccuaccagccgaccagcuucaagccgcccuccgacuacuggauccuccugaaccccaccaaccagcaggucgugcuggaggggaccaacaagacggacaucuggguggcccuccugcugguggagcccaacgugaccaaccagagccggcaguacacccucuucggcgagaccaagcagaucacggucgagaacaacaccaacaaguggaaguucuucgagauguuccgcuccagcguguccgccgaguuccagcacaagcggacccugaccagcgacacgaagcuggccggcuuccucaaguucuacaacuccguguggaccuucuacggggagacgccccacgcgaccaccgacuacagcuccaccagcaaccuguccgaggucgagaccgccauccacguggaguucuacaucaucccccgcagccaggaguccaagugcaacgaguacaucaacaccggccugugaggacuagucccuguucccagagcccacuuuuuuuucuuuuuuugaaauaaaauagccugucuuucagaucucaaaggcucuuuucagagccaccaaaaaaaaaaaaaaaaaaaaaaaaaaaaaaaaaaaaaaaaaaaaaaaaaaaaaaaaaaaaaaaaaaaaaaaaaaaaaaaaaaaaaaaaaaaaaaaaaaaaa

SEQ ID NO: 1293 - RNA, 866 nt, Artificial Sequence
  mRNA product Design a-1 (hSL-A100) comprising derived and/or modified sequence from RVA/BE1128/P[8]__AEX30671.1__SP-IgE_P2_VP8*(65-223) (opt1)
aggagagucccgcagucggcguccagcggcucugcuuguucgugugugugucguugcaggccuuauucaagcuuaccauggacuggaccuggauccuguuccucguggccgccgcgacccgcguccacagccaguacaucaaggccaacuccaaguucaucggcaucacggagcuggggagcggcuccgggcuggacggccccuaccagccgaccaccuucaccccgcccacggacuacuggauccucaucaccagcaacaccaacggggugguguacgaguccaccaacaacagcgacuucuggacggccgucaucgccguggagccccacgugaaccccgucgaccggcaguacaacguguucggcgagaacaagcaguucaacgugcgcaacgacuccgacaaguggaaguuccuggagauguuccggggcagcucccagaacgacuucuacaaccgccggacccugaccagcgacacccgccucgucgggauccugaaguacggcgggcggguguggacguuccacggcgagacgccccgcgccaccaccgacuccagcaacaccgcgaaccuggacgggaucuccaucaccauccacagcgaguucuacaucaucccccggucccaggagagcaagugcaacgaguacaucaacaacggccucugaggacuagucccuguucccagagcccacuuuuuuuucuuuuuuugaaauaaaauagccugucuuucagaucucaaaggcucuuuucagagccaccaaaaaaaaaaaaaaaaaaaaaaaaaaaaaaaaaaaaaaaaaaaaaaaaaaaaaaaaaaaaaaaaaaaaaaaaaaaaaaaaaaaaaaaaaaaaaaaaaaaaa

SEQ ID NO: 1294 - RNA, 866 nt, Artificial Sequence
  mRNA product Design a-1 (hSL-A100) comprising derived and/or modified sequence from RVA/Wa-VirWa/P[8]__ACR22783.1__SP-IgE_P2_VP8*(65-223) (opt1)
aggagagucccgcagucggcguccagcggcucugcuuguucgugugugugucguugcaggccuuauucaagcuuaccauggacuggaccuggauccuguuccucguggccgccgcgacccgcguccacagccaguacaucaaggccaacuccaaguucaucggcaucacggagcuggggagcggcuccgggcuggacggccccuaccagccgaccaccuucaccccgcccaacgacuacuggauccucaucaacagcaacacgaacggggugguguacgaguccaccaacaacagcgacuucuggaccgccgucguggccaucgagccccacgugaaccccgucgaccggcaguacaccaucuucggcgaguccaagcaguucaacgugcgcaacgacagcaacaaguggaaguuccuggagauguuccgguccagcucccagaacgaguucuacaaccgccggacgcugaccagcgacacccgccucgugggcauccugaaguacgggggccgggucuggaccuuccacggggagacgccccgcgccaccaccgacuccagcuccaccgcgaaccugaacaacaucagcaucacgauccacuccgaguucuacaucaucccccggagccaggaguccaagugcaacgaguacaucaacaacggccucugaggacuagucccuguucccagagcccacuuuuuuuucuuuuuuugaaauaaaauagccugucuuucagaucucaaaggcucuuuucagagccaccaaaaaaaaaaaaaaaaaaaaaaaaaaaaaaaaaaaaaaaaaaaaaaaaaaaaaaaaaaaaaaaaaaaaaaaaaaaaaaaaaaaaaaaaaaaaaaaaaaaaa

SEQ ID NO: 1295 - RNA, 866 nt, Artificial Sequence
  mRNA product Design a-1 (hSL-A100) comprising derived and/or modified sequence from RVA/Wa/P[8]__AAA47290.1__SP-IgE_P2_VP8*(65-223) (opt1)
aggagagucccgcagucggcguccagcggcucugcuuguucgugugugugucguugcaggccuuauucaagcuuaccauggacuggaccuggauccuguuccucguggccgccgcgacccgcguccacagccaguacaucaaggccaacuccaaguucaucggcaucacggagcuggggagcggcuccgggcuggacggccccuaccagccgaccaccuucaccccgcccaacgacuacuggauccucaucaacagcaacacgaacggggugguguacgaguccaccaacaacagcgacuucuggaccgccgucguggccaucgagccccacgugaaccccgucgaccggcaguacaccaucuucggcgaguccaagcaguucaacgugagcaacgacuccaacaaguggaaguuccuggagauguuccgcagcuccagccagaacgaguucuacaaccggcgcacgcugaccuccgacacccgguucgugggcauccucaaguacgggggccgcgucuggaccuuccacggggagacgccccgggccaccaccgacagcuccagcaccgcgaaccugaacaacaucuccaucacgauccacagcgaguucuacaucaucccccgcucccaggagagcaagugcaacgaguacaucaacaacggccugugaggacuagucccuguucccagagcccacuuuuuuuucuuuuuuugaaauaaaauagccugucuuucagaucucaaaggcucuuuucagagccaccaaaaaaaaaaaaaaaaaaaaaaaaaaaaaaaaaaaaaaaaaaaaaaaaaaaaaaaaaaaaaaaaaaaaaaaaaaaaaaaaaaaaaaaaaaaaaaaaaaaaa

SEQ ID NO: 1296 - RNA, 866 nt, Artificial Sequence; identical to SEQ ID NO: 1295
  mRNA product Design a-1 (hSL-A100) comprising derived and/or modified sequence from RVA/Wa/P[8]__AAA66953.1__SP-IgE_P2_VP8*(65-223) (opt1)

SEQ ID NO: 1297 - RNA, 938 nt, Artificial Sequence
  mRNA product Design a-1 (hSL-A100) comprising derived and/or modified sequence from RVA/BE1058/P[4]__AEX30665.1__SP-IgE_P2_VP8*(41-223) (opt1)
aggagagucccgcagucggcguccagcggcucugcuuguucgugugugugucguugcaggccuuauucaagcuuaccauggacuggaccuggauccuguuccucguggccgccgcgacccgcguccacagccaguacaucaaggccaacuccaaguucaucggcaucacggagcuggggagcggcuccggggcccagacccgguacgcccccgugaacuggggccacggggagaucaacgacagcaccaccguggagccgguccuggacggccccuaccagcccacgaccuucaagcccccgaacgacuacuggcuccugaucuccagcaacaccgacggcgugguguacgaguccaccaacaacagcgacuucuggacggccgucaucgcgguggagccccacgugaaccagaccaaccgccaguacguccuguucggggagaacaagcaguucaacaucgagaacuccagcgacaaguggaaguucuucgagauguucaagggcaacucccagagcgacuucuccaaccggcgcacccucaccagcuccaaccggcugguggggaugcugaaguacggcgggcgcguguggacguuccacggcgagacgccccgggccaccaccgacagcuccagcaccgccgaccucaacaacaucuccaucaucauccacagcgaguucuacaucaucccccgcagccaggaguccaagugcaacgaguacaucaacaacggccugugaggacuagucccuguucccagagcccacuuuuuuuucuuuuuuugaaauaaaauagccugucuuucagaucucaaaggcucuuuucagagccaccaaaaaaaaaaaaaaaaaaaaaaaaaaaaaaaaaaaaaaaaaaaaaaaaaaaaaaaaaaaaaaaaaaaaaaaaaaaaaaaaaaaaaaaaaaaaaaaaaaaaa

SEQ ID NO: 1298 - RNA, 938 nt, Artificial Sequence
  mRNA product Design a-1 (hSL-A100) comprising derived and/or modified sequence from RVA/DS-1/P[4]__CAD62680.1__SP-IgE_P2_VP8*(41-223) (opt1)
aggagagucccgcagucggcguccagcggcucugcuuguucgugugugugucguugcaggccuuauucaagcuuaccauggacuggaccuggauccuguuccucguggccgccgcgacccgcguccacagccaguacaucaaggccaacuccaaguucaucggcaucacggagcuggggagcggcuccggggcccagacccgguacgcccccgugaacuggggcagcugggagaucaacgacuccaccaccguggagccgguccuggacgggcccuaccagcccacgaccuucaagcccccgaacgacuacuggcuccugaucagcuccaacaccaacggcgugguguacgagagcaccaacaacaacgacuucuggacggccgucuccagcguggagccccacgugucccagaccaaccgccaguacauccuguucggcgagaacaagcaguucaacgucgagaacaacagcgacaaguggaaguucuucgagaccuucaccggguccagccagggcaacuucuccaaccggcgcacgcucaccagcuccaaccggcugguggggaugcugaaguacggcgggcgcguguggaccuuccacggcgagacgccccgggcgaccaccgacagcuccaacaccgccgaccucaacaacaucagcaucaucauccacagcgaguucuacaucaucccccgcucccaggagagcaagugcaacgaguacaucaacaacggccugugaggacuagucccuguucccagagcccacuuuuuuuucuuuuuuugaaauaaaauagccugucuuucagaucucaaaggcucuuuucagagccaccaaaaaaaaaaaaaaaaaaaaaaaaaaaaaaaaaaaaaaaaaaaaaaaaaaaaaaaaaaaaaaaaaaaaaaaaaaaaaaaaaaaaaaaaaaaaaaaaaaaaa

SEQ ID NO: 1299 - RNA, 938 nt, Artificial Sequence; identical to SEQ ID NO: 1298
  mRNA product Design a-1 (hSL-A100) comprising derived and/or modified sequence from RVA/DS-1/P[4]__ABV53252.1__SP-IgE_P2_VP8*(41-223) (opt1)

SEQ ID NO: 1300 - RNA, 938 nt, Artificial Sequence
  mRNA product Design a-1 (hSL-A100) comprising derived and/or modified sequence from RVA/F01322/P[6]__AFA51886.1__SP-IgE_P2_VP8*(41-223) (opt1)
aggagagucccgcagucggcguccagcggcucugcuuguucgugugugugucguugcaggccuuauucaagcuuaccauggacuggaccuggauccuguuccucguggccgccgcgacccgcguccacagccaguacaucaaggccaacuccaaguucaucggcaucacggagcuggggagcggcuccggggcccagaccaacuacgcccccgugaccuggagccacggcgaggugaacgacuccaccacgaucgagccgguccuggacgggcccuaccagcccaccaacuucaagcccccgaacgacuacuggauccuccugaaccccaccaaccagcaggucgugcuggagggcaccaacaagacggacaucuggguggcccuccugcugguggagcccaacgugaccaaccagagccggcaguacacccucuucggcgagaccaagcagaucacggucgagaacaacaccaacaaguggaaguucuucgagauguuccgcuccagcguguccgcggaguuccagcacaagcggacccugaccagcgacacgaagcuggccggguucaugaaguucuacaacuccguguggaccuuccacggcgagacccccaacgccaccacggacuacagcuccaccagcaaccucuucgaggucgagaccgugauccacguggaguucuacaucaucccgcgcucccaggagagcaagugcuccgaguacaucaacaccgggcugugaggacuagucccuguucccagagcccacuuuuuuuucuuuuuuugaaauaaaauagccugucuuucagaucucaaaggcucuuuucagagccaccaaaaaaaaaaaaaaaaaaaaaaaaaaaaaaaaaaaaaaaaaaaaaaaaaaaaaaaaaaaaaaaaaaaaaaaaaaaaaaaaaaaaaaaaaaaaaaaaaaaaa

SEQ ID NO: 1301 - RNA, 938 nt, Artificial Sequence
  mRNA product Design a-1 (hSL-A100) comprising derived and/or modified sequence from RVA/1076/P[6]__AAA47337.1__SP-IgE_P2_VP8*(41-223) (opt1)
aggagagucccgcagucggcguccagcggcucugcuuguucgugugugugucguugcaggccuuauucaagcuuaccauggacuggaccuggauccuguuccucguggccgccgcgacccgcguccacagccaguacaucaaggccaacuccaaguucaucggcaucacggagcuggggagcggcuccggggcccagaccaacuacgcccccgugaccuggagccacggcgaggugaacgacuccaccacgaucgagccgguccuggacgggcccuaccagcccaccagcuucaagcccccguccgacuacuggauccuccugaaccccaccaaccagcaggucgugcuggagggcaccaacaagacggacaucuggguggcccuccugcugguggagcccaacgugaccaaccagagccggcaguacacccucuucggcgagaccaagcagaucacggucgagaacaacaccaacaaguggaaguucuucgagauguuccgcuccagcguguccgcggaguuccagcacaagcggacccugaccagcgacacgaagcuggccggguuccucaaguucuacaacuccguguggaccuucuacggcgagacgccccacgccaccaccgacuacagcuccaccagcaaccuguccgaggucgagaccgccauccacguggaguucuacaucaucccgcgcagccaggaguccaagugcaacgaguacaucaacaccgggcugugaggacuagucccuguucccagagcccacuuuuuuuucuuuuuuugaaauaaaauagccugucuuucagaucucaaaggcucuuuucagagccaccaaaaaaaaaaaaaaaaaaaaaaaaaaaaaaaaaaaaaaaaaaaaaaaaaaaaaaaaaaaaaaaaaaaaaaaaaaaaaaaaaaaaaaaaaaaaaaaaaaaaa

SEQ ID NO: 1302 - RNA, 938 nt, Artificial Sequence
  mRNA product Design a-1 (hSL-A100) comprising derived and/or modified sequence from RVA/BE1128/P[8]__AEX30671.1__SP-IgE_P2_VP8*(41-223) (opt1)
aggagagucccgcagucggcguccagcggcucugcuuguucgugugugugucguugcaggccuuauucaagcuuaccauggacuggaccuggauccuguuccucguggccgccgcgacccgcguccacagccaguacaucaaggccaacuccaaguucaucggcaucacggagcuggggagcggcuccggggcccagacccgguacgcccccgugaacuggggccacggggagaucaacgacagcaccaccguggagccgauccuggacggccccuaccagcccacgaccuucacgcccccgaccgacuacuggauccucaucaccuccaacaccaacggcgucguguacgagagcaccaacaacuccgacuucuggaccgccgugaucgcggucgagccccacgugaaccccguggaccgccaguacaacgucuucggggagaacaagcaguucaacgugcggaacgacagcgacaaguggaaguuccuggagauguuccgcggcuccagccagaacgacuucuacaaccggcgcacgcugaccuccgacacccggcucguggggauccugaaguacggcgggcgcgucuggaccuuccacggcgagacgccccgggccaccaccgacagcuccaacaccgccaaccuggacggcaucagcaucacgauccacuccgaguucuacaucaucccgcgcagccaggaguccaagugcaacgaguacaucaacaacgggcucugaggacuagucccuguucccagagcccacuuuuuuuucuuuuuuugaaauaaaauagccugucuuucagaucucaaaggcucuuuucagagccaccaaaaaaaaaaaaaaaaaaaaaaaaaaaaaaaaaaaaaaaaaaaaaaaaaaaaaaaaaaaaaaaaaaaaaaaaaaaaaaaaaaaaaaaaaaaaaaaaaaaaa

SEQ ID NO: 1303 - RNA, 938 nt, Artificial Sequence
  mRNA product Design a-1 (hSL-A100) comprising derived and/or modified sequence from RVA/Wa-VirWa/P[8]__ACR22783.1__SP-IgE_P2_VP8*(41-223) (opt1)
aggagagucccgcagucggcguccagcggcucugcuuguucgugugugugucguugcaggccuuauucaagcuuaccauggacuggaccuggauccuguuccucguggccgccgcgacccgcguccacagccaguacaucaaggccaacuccaaguucaucggcaucacggagcuggggagcggcuccggggcccagacccgguacgcccccgugaacuggggccacggggagaucaacgacagcaccaccguggagccgauccuggacggccccuaccagcccacgaccuucacgcccccgaacgacuacuggauccucaucaacuccaacaccaacggcgucguguacgagagcaccaacaacuccgacuucuggaccgccguggucgcgaucgagccccacgugaaccccguggaccgccaguacaccaucuucggggagagcaagcaguucaacguccggaacgacuccaacaaguggaaguuccuggagauguuccgcagcuccagccagaacgaguucuacaaccggcgcacccugacguccgacacccggcucgugggcauccugaaguacgggggccgcguguggaccuuccacggggagacgccccgggccaccaccgacagcuccagcaccgccaaccugaacaacaucuccaucaccauccacagcgaguucuacaucaucccgcgcucccaggagagcaagugcaacgaguacaucaacaacggccucugaggacuagucccuguucccagagcccacuuuuuuuucuuuuuuugaaauaaaauagccugucuuucagaucucaaaggcucuuuucagagccaccaaaaaaaaaaaaaaaaaaaaaaaaaaaaaaaaaaaaaaaaaaaaaaaaaaaaaaaaaaaaaaaaaaaaaaaaaaaaaaaaaaaaaaaaaaaaaaaaaaaaa

SEQ ID NO: 1304 - RNA, 938 nt, Artificial Sequence
  mRNA product Design a-1 (hSL-A100) comprising derived and/or modified sequence from RVA/Wa/P[8]__AAA47290.1__SP-IgE_P2_VP8*(41-223) (opt1)
aggagagucccgcagucggcguccagcggcucugcuuguucgugugugugucguugcaggccuuauucaagcuuaccauggacuggaccuggauccuguuccucguggccgccgcgacccgcguccacagccaguacaucaaggccaacuccaaguucaucggcaucacggagcuggggagcggcuccggggcccagacccgguacgcccccgugaacuggggccacggggagaucaacgacagcaccaccguggagccgauccuggacggccccuaccagcccacgaccuucacgcccccgaacgacuacuggauccucaucaacuccaacaccaacggcgucguguacgagagcaccaacaacuccgacuucuggaccgccguggucgcgaucgagccccacgugaaccccguggaccgccaguacaccaucuucggggagagcaagcaguucaacgucuccaacgacagcaacaaguggaaguuccuggagauguuccgguccagcucccagaacgaguucuacaaccgccggacccugacgagcgacacccgcuucgugggcauccucaaguacgggggccggguguggaccuuccacggggagacgccccgcgccaccaccgacuccagcuccaccgccaaccugaacaacaucagcaucaccauccacuccgaguucuacaucaucccgcggagccaggagagcaagugcaacgaguacaucaacaacggccugugaggacuagucccuguucccagagcccacuuuuuuuucuuuuuuugaaauaaaauagccugucuuucagaucucaaaggcucuuuucagagccaccaaaaaaaaaaaaaaaaaaaaaaaaaaaaaaaaaaaaaaaaaaaaaaaaaaaaaaaaaaaaaaaaaaaaaaaaaaaaaaaaaaaaaaaaaaaaaaaaaaaaa

SEQ ID NO: 1305 - RNA, 938 nt, Artificial Sequence
  mRNA product Design a-1 (hSL-A100) comprising derived and/or modified sequence from RVA/Wa/P[8]__AAA66953.1__SP-IgE_P2_VP8*(41-223) (opt1)
aggagagucccgcagucggcguccagcggcucugcuuguucgugugugugucguugcaggccuuauucaagcuuaccauggacuggaccuggauccuguuccucguggccgccgcgacccgcguccacagccaguacaucaaggccaacuccaaguucaucggcaucacggagcuggggagcggcuccggggcccagacccgguacgcccccgugaacuggggccacggggagaucaacgacagcaccaccguggagccgaugcuggacggccccuaccagcccacgaccuucacgcccccgaacgacuacuggauccucaucaacuccaacaccaacggcgucguguacgagagcaccaacaacuccgacuucuggaccgccguggucgcgaucgagccccacgugaaccccguggaccgccaguacaccaucuucggggagagcaagcaguucaacgucuccaacgacagcaacaaguggaaguuccuggagauguuccgguccagcucccagaacgaguucuacaaccgccggacccugacgagcgacacccgcuucgugggcauccucaaguacgggggccggguguggaccuuccacggggagacgccccgcgccaccaccgacuccagcuccaccgccaaccugaacaacaucagcaucaccauccacuccgaguucuacaucaucccgcggagccaggagagcaagugcaacgaguacaucaacaacggccugugaggacuagucccuguucccagagcccacuuuuuuuucuuuuuuugaaauaaaauagccugucuuucagaucucaaaggcucuuuucagagccaccaaaaaaaaaaaaaaaaaaaaaaaaaaaaaaaaaaaaaaaaaaaaaaaaaaaaaaaaaaaaaaaaaaaaaaaaaaaaaaaaaaaaaaaaaaaaaaaaaaaaa

SEQ ID NO: 1306 - RNA, 815 nt, Artificial Sequence
  mRNA product Design a-1 (hSL-A100) comprising derived and/or modified sequence from RVA/BE1058/P[4]__AEX30665.1__P2_VP8*(65-223) (opt4)
aggagagucccgcagucggcguccagcggcucugcuuguucgugugugugucguugcaggccuuauucaagcuuaccaugcaguacaucaaggccaacagcaaguucaucggcaucaccgagcugggcagcggcagcggccuggacggccccuaccagcccaccaccuucaagccccccaacgacuacuggcugcugaucagcagcaacaccgacggcgugguguacgagagcaccaacaacagcgacuucuggaccgccgugaucgccguggagccccacgugaaccagaccaacagacaguacgugcuguucggcgagaacaagcaguucaacaucgagaacagcagcgacaaguggaaguucuucgagauguucaagggcaacagccagagcgacuucagcaacagaagaacccugaccagcagcaacagacuggugggcaugcugaaguacggcggcagaguguggaccuuccacggcgagacccccagagccaccaccgacagcagcagcaccgccgaccugaacaacaucagcaucaucauccacagcgaguucuacaucauccccagaagccaggagagcaagugcaacgaguacaucaacaacggccugugaggacuagucccuguucccagagcccacuuuuuuuucuuuuuuugaaauaaaauagccugucuuucagaucucaaaggcucuuuucagagccaccaaaaaaaaaaaaaaaaaaaaaaaaaaaaaaaaaaaaaaaaaaaaaaaaaaaaaaaaaaaaaaaaaaaaaaaaaaaaaaaaaaaaaaaaaaaaaaaaaaaaa

SEQ ID NO: 1307 - RNA, 815 nt, Artificial Sequence
  mRNA product Design a-1 (hSL-A100) comprising derived and/or modified sequence from RVA/DS-1/P[4]__CAD62680.1__P2_VP8*(65-223) (opt4)
aggagagucccgcagucggcguccagcggcucugcuuguucgugugugugucguugcaggccuuauucaagcuuaccaugcaguacaucaaggccaacagcaaguucaucggcaucaccgagcugggcagcggcagcggccuggacggccccuaccagcccaccaccuucaagccccccaacgacuacuggcugcugaucagcagcaacaccaacggcgugguguacgagagcaccaacaacaacgacuucuggaccgccgugagcagcguggagccccacgugagccagaccaacagacaguacauccuguucggcgagaacaagcaguucaacguggagaacaacagcgacaaguggaaguucuucgagaccuucaccggcagcagccagggcaacuucagcaacagaagaacccugaccagcagcaacagacuggugggcaugcugaaguacggcggcagaguguggaccuuccacggcgagacccccagagccaccaccgacagcagcaacaccgccgaccugaacaacaucagcaucaucauccacagcgaguucuacaucauccccagaagccaggagagcaagugcaacgaguacaucaacaacggccugugaggacuagucccuguucccagagcccacuuuuuuuucuuuuuuugaaauaaaauagccugucuuucagaucucaaaggcucuuuucagagccaccaaaaaaaaaaaaaaaaaaaaaaaaaaaaaaaaaaaaaaaaaaaaaaaaaaaaaaaaaaaaaaaaaaaaaaaaaaaaaaaaaaaaaaaaaaaaaaaaaaaaa

SEQ ID NO: 1308 - RNA, 815 nt, Artificial Sequence; identical to SEQ ID NO: 1307
  mRNA product Design a-1 (hSL-A100) comprising derived and/or modified sequence from RVA/DS-1/P[4]__ABV53252.1__P2_VP8*(65-223) (opt4)

SEQ ID NO: 1309 - RNA, 815 nt, Artificial Sequence
  mRNA product Design a-1 (hSL-A100) comprising derived and/or modified sequence from RVA/F01322/P[6]__AFA51886.1__P2_VP8*(65-223) (opt4)
aggagagucccgcagucggcguccagcggcucugcuuguucgugugugugucguugcaggccuuauucaagcuuaccaugcaguacaucaaggccaacagcaaguucaucggcaucaccgagcugggcagcggcagcggccuggacggccccuaccagcccaccaacuucaagccccccaacgacuacuggauccugcugaaccccaccaaccagcagguggugcuggagggcaccaacaagaccgacaucuggguggcccugcugcugguggagcccaacgugaccaaccagagcagacaguacacccuguucggcgagaccaagcagaucaccguggagaacaacaccaacaaguggaaguucuucgagauguucagaagcagcgugagcgccgaguuccagcacaagagaacccugaccagcgacaccaagcuggccggcuucaugaaguucuacaacagcguguggaccuuccacggcgagacccccaacgccaccaccgacuacagcagcaccagcaaccuguucgagguggagaccgugauccacguggaguucuacaucauccccagaagccaggagagcaagugcagcgaguacaucaacaccggccugugaggacuagucccuguucccagagcccacuuuuuuuucuuuuuuugaaauaaaauagccugucuuucagaucucaaaggcucuuuucagagccaccaaaaaaaaaaaaaaaaaaaaaaaaaaaaaaaaaaaaaaaaaaaaaaaaaaaaaaaaaaaaaaaaaaaaaaaaaaaaaaaaaaaaaaaaaaaaaaaaaaaaa

SEQ ID NO: 1310 - RNA, 815 nt, Artificial Sequence
  mRNA product Design a-1 (hSL-A100) comprising derived and/or modified sequence from RVA/1076/P[6]__AAA47337.1__P2_VP8*(65-223) (opt4)
aggagagucccgcagucggcguccagcggcucugcuuguucgugugugugucguugcaggccuuauucaagcuuaccaugcaguacaucaaggccaacagcaaguucaucggcaucaccgagcugggcagcggcagcggccuggacggccccuaccagcccaccagcuucaagccccccagcgacuacuggauccugcugaaccccaccaaccagcagguggugcuggagggcaccaacaagaccgacaucuggguggcccugcugcugguggagcccaacgugaccaaccagagcagacaguacacccuguucggcgagaccaagcagaucaccguggagaacaacaccaacaaguggaaguucuucgagauguucagaagcagcgugagcgccgaguuccagcacaagagaacccugaccagcgacaccaagcuggccggcuuccugaaguucuacaacagcguguggaccuucuacggcgagaccccccacgccaccaccgacuacagcagcaccagcaaccugagcgagguggagaccgccauccacguggaguucuacaucauccccagaagccaggagagcaagugcaacgaguacaucaacaccggccugugaggacuagucccuguucccagagcccacuuuuuuuucuuuuuuugaaauaaaauagccugucuuucagaucucaaaggcucuuuucagagccaccaaaaaaaaaaaaaaaaaaaaaaaaaaaaaaaaaaaaaaaaaaaaaaaaaaaaaaaaaaaaaaaaaaaaaaaaaaaaaaaaaaaaaaaaaaaaaaaaaaaaa

SEQ ID NO: 1311 - RNA, 815 nt, Artificial Sequence
  mRNA product Design a-1 (hSL-A100) comprising derived and/or modified sequence from RVA/BE1128/P[8]__AEX30671.1__P2_VP8*(65-223) (opt4)
aggagagucccgcagucggcguccagcggcucugcuuguucgugugugugucguugcaggccuuauucaagcuuaccaugcaguacaucaaggccaacagcaaguucaucggcaucaccgagcugggcagcggcagcggccuggacggccccuaccagcccaccaccuucaccccccccaccgacuacuggauccugaucaccagcaacaccaacggcgugguguacgagagcaccaacaacagcgacuucuggaccgccgugaucgccguggagccccacgugaaccccguggacagacaguacaacguguucggcgagaacaagcaguucaacgugagaaacgacagcgacaaguggaaguuccuggagauguucagaggcagcagccagaacgacuucuacaacagaagaacccugaccagcgacaccagacuggugggcauccugaaguacggcggcagaguguggaccuuccacggcgagacccccagagccaccaccgacagcagcaacaccgccaaccuggacggcaucagcaucaccauccacagcgaguucuacaucauccccagaagccaggagagcaagugcaacgaguacaucaacaacggccugugaggacuagucccuguucccagagcccacuuuuuuuucuuuuuuugaaauaaaauagccugucuuucagaucucaaaggcucuuuucagagccaccaaaaaaaaaaaaaaaaaaaaaaaaaaaaaaaaaaaaaaaaaaaaaaaaaaaaaaaaaaaaaaaaaaaaaaaaaaaaaaaaaaaaaaaaaaaaaaaaaaaaa

SEQ ID NO: 1312 - RNA, 815 nt, Artificial Sequence
  mRNA product Design a-1 (hSL-A100) comprising derived and/or modified sequence from RVA/Wa-VirWa/P[8]__ACR22783.1__P2_VP8*(65-223) (opt4)
aggagagucccgcagucggcguccagcggcucugcuuguucgugugugugucguugcaggccuuauucaagcuuaccaugcaguacaucaaggccaacagcaaguucaucggcaucaccgagcugggcagcggcagcggccuggacggccccuaccagcccaccaccuucaccccccccaacgacuacuggauccugaucaacagcaacaccaacggcgugguguacgagagcaccaacaacagcgacuucuggaccgccgugguggccaucgagccccacgugaaccccguggacagacaguacaccaucuucggcgagagcaagcaguucaacgugagaaacgacagcaacaaguggaaguuccuggagauguucagaagcagcagccagaacgaguucuacaacagaagaacccugaccagcgacaccagacuggugggcauccugaaguacggcggcagaguguggaccuuccacggcgagacccccagagccaccaccgacagcagcagcaccgccaaccugaacaacaucagcaucaccauccacagcgaguucuacaucauccccagaagccaggagagcaagugcaacgaguacaucaacaacggccugugaggacuagucccuguucccagagcccacuuuuuuuucuuuuuuugaaauaaaauagccugucuuucagaucucaaaggcucuuuucagagccaccaaaaaaaaaaaaaaaaaaaaaaaaaaaaaaaaaaaaaaaaaaaaaaaaaaaaaaaaaaaaaaaaaaaaaaaaaaaaaaaaaaaaaaaaaaaaaaaaaaaaa

SEQ ID NO: 1313 - RNA, 815 nt, Artificial Sequence
  mRNA product Design a-1 (hSL-A100) comprising derived and/or modified sequence from RVA/Wa/P[8]__AAA47290.1__P2_VP8*(65-223) (opt4)
aggagagucccgcagucggcguccagcggcucugcuuguucgugugugugucguugcaggccuuauucaagcuuaccaugcaguacaucaaggccaacagcaaguucaucggcaucaccgagcugggcagcggcagcggccuggacggccccuaccagcccaccaccuucaccccccccaacgacuacuggauccugaucaacagcaacaccaacggcgugguguacgagagcaccaacaacagcgacuucuggaccgccgugguggccaucgagccccacgugaaccccguggacagacaguacaccaucuucggcgagagcaagcaguucaacgugagcaacgacagcaacaaguggaaguuccuggagauguucagaagcagcagccagaacgaguucuacaacagaagaacccugaccagcgacaccagauucgugggcauccugaaguacggcggcagaguguggaccuuccacggcgagacccccagagccaccaccgacagcagcagcaccgccaaccugaacaacaucagcaucaccauccacagcgaguucuacaucauccccagaagccaggagagcaagugcaacgaguacaucaacaacggccugugaggacuagucccuguucccagagcccacuuuuuuuucuuuuuuugaaauaaaauagccugucuuucagaucucaaaggcucuuuucagagccaccaaaaaaaaaaaaaaaaaaaaaaaaaaaaaaaaaaaaaaaaaaaaaaaaaaaaaaaaaaaaaaaaaaaaaaaaaaaaaaaaaaaaaaaaaaaaaaaaaaaaa

SEQ ID NO: 1314 - RNA, 815 nt, Artificial Sequence; identical to SEQ ID NO: 1313
  mRNA product Design a-1 (hSL-A100) comprising derived and/or modified sequence from RVA/Wa/P[8]__AAA66953.1__P2_VP8*(65-223) (opt4)

SEQ ID NO: 1315 - RNA, 887 nt, Artificial Sequence
  mRNA product Design a-1 (hSL-A100) comprising derived and/or modified sequence from RVA/BE1058/P[4]__AEX30665.1__P2_VP8*(41-223) (opt4)
aggagagucccgcagucggcguccagcggcucugcuuguucgugugugugucguugcaggccuuauucaagcuuaccaugcaguacaucaaggccaacagcaaguucaucggcaucaccgagcugggcagcggcagcggcgcccagaccagauacgcccccgugaacuggggccacggcgagaucaacgacagcaccaccguggagcccgugcuggacggccccuaccagcccaccaccuucaagccccccaacgacuacuggcugcugaucagcagcaacaccgacggcgugguguacgagagcaccaacaacagcgacuucuggaccgccgugaucgccguggagccccacgugaaccagaccaacagacaguacgugcuguucggcgagaacaagcaguucaacaucgagaacagcagcgacaaguggaaguucuucgagauguucaagggcaacagccagagcgacuucagcaacagaagaacccugaccagcagcaacagacuggugggcaugcugaaguacggcggcagaguguggaccuuccacggcgagacccccagagccaccaccgacagcagcagcaccgccgaccugaacaacaucagcaucaucauccacagcgaguucuacaucauccccagaagccaggagagcaagugcaacgaguacaucaacaacggccugugaggacuagucccuguucccagagcccacuuuuuuuucuuuuuuugaaauaaaauagccugucuuucagaucucaaaggcucuuuucagagccaccaaaaaaaaaaaaaaaaaaaaaaaaaaaaaaaaaaaaaaaaaaaaaaaaaaaaaaaaaaaaaaaaaaaaaaaaaaaaaaaaaaaaaaaaaaaaaaaaaaaaa

SEQ ID NO: 1316 - RNA, 887 nt, Artificial Sequence
  mRNA product Design a-1 (hSL-A100) comprising derived and/or modified sequence from RVA/DS-1/P[4]__CAD62680.1__P2_VP8*(41-223) (opt4)
aggagagucccgcagucggcguccagcggcucugcuuguucgugugugugucguugcaggccuuauucaagcuuaccaugcaguacaucaaggccaacagcaaguucaucggcaucaccgagcugggcagcggcagcggcgcccagaccagauacgcccccgugaacuggggcagcugggagaucaacgacagcaccaccguggagcccgugcuggacggccccuaccagcccaccaccuucaagccccccaacgacuacuggcugcugaucagcagcaacaccaacggcgugguguacgagagcaccaacaacaacgacuucuggaccgccgugagcagcguggagccccacgugagccagaccaacagacaguacauccuguucggcgagaacaagcaguucaacguggagaacaacagcgacaaguggaaguucuucgagaccuucaccggcagcagccagggcaacuucagcaacagaagaacccugaccagcagcaacagacuggugggcaugcugaaguacggcggcagaguguggaccuuccacggcgagacccccagagccaccaccgacagcagcaacaccgccgaccugaacaacaucagcaucaucauccacagcgaguucuacaucauccccagaagccaggagagcaagugcaacgaguacaucaacaacggccugugaggacuagucccuguucccagagcccacuuuuuuuucuuuuuuugaaauaaaauagccugucuuucagaucucaaaggcucuuuucagagccaccaaaaaaaaaaaaaaaaaaaaaaaaaaaaaaaaaaaaaaaaaaaaaaaaaaaaaaaaaaaaaaaaaaaaaaaaaaaaaaaaaaaaaaaaaaaaaaaaaaaaa

SEQ ID NO: 1317 - RNA, 887 nt, Artificial Sequence; identical to SEQ ID NO: 1316
  mRNA product Design a-1 (hSL-A100) comprising derived and/or modified sequence from RVA/DS-1/P[4]__ABV53252.1__P2_VP8*(41-223) (opt4)

SEQ ID NO: 1318 - RNA, 887 nt, Artificial Sequence
  mRNA product Design a-1 (hSL-A100) comprising derived and/or modified sequence from RVA/F01322/P[6]__AFA51886.1__P2_VP8*(41-223) (opt4)
aggagagucccgcagucggcguccagcggcucugcuuguucgugugugugucguugcaggccuuauucaagcuuaccaugcaguacaucaaggccaacagcaaguucaucggcaucaccgagcugggcagcggcagcggcgcccagaccaacuacgcccccgugaccuggagccacggcgaggugaacgacagcaccaccaucgagcccgugcuggacggccccuaccagcccaccaacuucaagccccccaacgacuacuggauccugcugaaccccaccaaccagcagguggugcuggagggcaccaacaagaccgacaucuggguggcccugcugcugguggagcccaacgugaccaaccagagcagacaguacacccuguucggcgagaccaagcagaucaccguggagaacaacaccaacaaguggaaguucuucgagauguucagaagcagcgugagcgccgaguuccagcacaagagaacccugaccagcgacaccaagcuggccggcuucaugaaguucuacaacagcguguggaccuuccacggcgagacccccaacgccaccaccgacuacagcagcaccagcaaccuguucgagguggagaccgugauccacguggaguucuacaucauccccagaagccaggagagcaagugcagcgaguacaucaacaccggccugugaggacuagucccuguucccagagcccacuuuuuuuucuuuuuuugaaauaaaauagccugucuuucagaucucaaaggcucuuuucagagccaccaaaaaaaaaaaaaaaaaaaaaaaaaaaaaaaaaaaaaaaaaaaaaaaaaaaaaaaaaaaaaaaaaaaaaaaaaaaaaaaaaaaaaaaaaaaaaaaaaaaaa

SEQ ID NO: 1319 - RNA, 887 nt, Artificial Sequence
  mRNA product Design a-1 (hSL-A100) comprising derived and/or modified sequence from RVA/1076/P[6]__AAA47337.1__P2_VP8*(41-223) (opt4)
aggagagucccgcagucggcguccagcggcucugcuuguucgugugugugucguugcaggccuuauucaagcuuaccaugcaguacaucaaggccaacagcaaguucaucggcaucaccgagcugggcagcggcagcggcgcccagaccaacuacgcccccgugaccuggagccacggcgaggugaacgacagcaccaccaucgagcccgugcuggacggccccuaccagcccaccagcuucaagccccccagcgacuacuggauccugcugaaccccaccaaccagcagguggugcuggagggcaccaacaagaccgacaucuggguggcccugcugcugguggagcccaacgugaccaaccagagcagacaguacacccuguucggcgagaccaagcagaucaccguggagaacaacaccaacaaguggaaguucuucgagauguucagaagcagcgugagcgccgaguuccagcacaagagaacccugaccagcgacaccaagcuggccggcuuccugaaguucuacaacagcguguggaccuucuacggcgagaccccccacgccaccaccgacuacagcagcaccagcaaccugagcgagguggagaccgccauccacguggaguucuacaucauccccagaagccaggagagcaagugcaacgaguacaucaacaccggccugugaggacuagucccuguucccagagcccacuuuuuuuucuuuuuuugaaauaaaauagccugucuuucagaucucaaaggcucuuuucagagccaccaaaaaaaaaaaaaaaaaaaaaaaaaaaaaaaaaaaaaaaaaaaaaaaaaaaaaaaaaaaaaaaaaaaaaaaaaaaaaaaaaaaaaaaaaaaaaaaaaaaaa

SEQ ID NO: 1320 - RNA, 887 nt, Artificial Sequence
  mRNA product Design a-1 (hSL-A100) comprising derived and/or modified sequence from RVA/BE1128/P[8]__AEX30671.1__P2_VP8*(41-223) (opt4)
aggagagucccgcagucggcguccagcggcucugcuuguucgugugugugucguugcaggccuuauucaagcuuaccaugcaguacaucaaggccaacagcaaguucaucggcaucaccgagcugggcagcggcagcggcgcccagaccagauacgcccccgugaacuggggccacggcgagaucaacgacagcaccaccguggagcccauccuggacggccccuaccagcccaccaccuucaccccccccaccgacuacuggauccugaucaccagcaacaccaacggcgugguguacgagagcaccaacaacagcgacuucuggaccgccgugaucgccguggagccccacgugaaccccguggacagacaguacaacguguucggcgagaacaagcaguucaacgugagaaacgacagcgacaaguggaaguuccuggagauguucagaggcagcagccagaacgacuucuacaacagaagaacccugaccagcgacaccagacuggugggcauccugaaguacggcggcagaguguggaccuuccacggcgagacccccagagccaccaccgacagcagcaacaccgccaaccuggacggcaucagcaucaccauccacagcgaguucuacaucauccccagaagccaggagagcaagugcaacgaguacaucaacaacggccugugaggacuagucccuguucccagagcccacuuuuuuuucuuuuuuugaaauaaaauagccugucuuucagaucucaaaggcucuuuucagagccaccaaaaaaaaaaaaaaaaaaaaaaaaaaaaaaaaaaaaaaaaaaaaaaaaaaaaaaaaaaaaaaaaaaaaaaaaaaaaaaaaaaaaaaaaaaaaaaaaaaaaa

SEQ ID NO: 1321 - RNA, 887 nt, Artificial Sequence
  mRNA product Design a-1 (hSL-A100) comprising derived and/or modified sequence from RVA/Wa-VirWa/P[8]__ACR22783.1__P2_VP8*(41-223) (opt4)
aggagagucccgcagucggcguccagcggcucugcuuguucgugugugugucguugcaggccuuauucaagcuuaccaugcaguacaucaaggccaacagcaaguucaucggcaucaccgagcugggcagcggcagcggcgcccagaccagauacgcccccgugaacuggggccacggcgagaucaacgacagcaccaccguggagcccauccuggacggccccuaccagcccaccaccuucaccccccccaacgacuacuggauccugaucaacagcaacaccaacggcgugguguacgagagcaccaacaacagcgacuucuggaccgccgugguggccaucgagccccacgugaaccccguggacagacaguacaccaucuucggcgagagcaagcaguucaacgugagaaacgacagcaacaaguggaaguuccuggagauguucagaagcagcagccagaacgaguucuacaacagaagaacccugaccagcgacaccagacuggugggcauccugaaguacggcggcagaguguggaccuuccacggcgagacccccagagccaccaccgacagcagcagcaccgccaaccugaacaacaucagcaucaccauccacagcgaguucuacaucauccccagaagccaggagagcaagugcaacgaguacaucaacaacggccugugaggacuagucccuguucccagagcccacuuuuuuuucuuuuuuugaaauaaaauagccugucuuucagaucucaaaggcucuuuucagagccaccaaaaaaaaaaaaaaaaaaaaaaaaaaaaaaaaaaaaaaaaaaaaaaaaaaaaaaaaaaaaaaaaaaaaaaaaaaaaaaaaaaaaaaaaaaaaaaaaaaaaa

SEQ ID NO: 1322 - RNA, 887 nt, Artificial Sequence
  mRNA product Design a-1 (hSL-A100) comprising derived and/or modified sequence from RVA/Wa/P[8]__AAA47290.1__P2_VP8*(41-223) (opt4)
aggagagucccgcagucggcguccagcggcucugcuuguucgugugugugucguugcaggccuuauucaagcuuaccaugcaguacaucaaggccaacagcaaguucaucggcaucaccgagcugggcagcggcagcggcgcccagaccagauacgcccccgugaacuggggccacggcgagaucaacgacagcaccaccguggagcccauccuggacggccccuaccagcccaccaccuucaccccccccaacgacuacuggauccugaucaacagcaacaccaacggcgugguguacgagagcaccaacaacagcgacuucuggaccgccgugguggccaucgagccccacgugaaccccguggacagacaguacaccaucuucggcgagagcaagcaguucaacgugagcaacgacagcaacaaguggaaguuccuggagauguucagaagcagcagccagaacgaguucuacaacagaagaacccugaccagcgacaccagauucgugggcauccugaaguacggcggcagaguguggaccuuccacggcgagacccccagagccaccaccgacagcagcagcaccgccaaccugaacaacaucagcaucaccauccacagcgaguucuacaucauccccagaagccaggagagcaagugcaacgaguacaucaacaacggccugugaggacuagucccuguucccagagcccacuuuuuuuucuuuuuuugaaauaaaauagccugucuuucagaucucaaaggcucuuuucagagccaccaaaaaaaaaaaaaaaaaaaaaaaaaaaaaaaaaaaaaaaaaaaaaaaaaaaaaaaaaaaaaaaaaaaaaaaaaaaaaaaaaaaaaaaaaaaaaaaaaaaaa

SEQ ID NO: 1323 - RNA, 887 nt, Artificial Sequence
  mRNA product Design a-1 (hSL-A100) comprising derived and/or modified sequence from RVA/Wa/P[8]__AAA66953.1__P2_VP8*(41-223) (opt4)
aggagagucccgcagucggcguccagcggcucugcuuguucgugugugugucguugcaggccuuauucaagcuuaccaugcaguacaucaaggccaacagcaaguucaucggcaucaccgagcugggcagcggcagcggcgcccagaccagauacgcccccgugaacuggggccacggcgagaucaacgacagcaccaccguggagcccaugcuggacggccccuaccagcccaccaccuucaccccccccaacgacuacuggauccugaucaacagcaacaccaacggcgugguguacgagagcaccaacaacagcgacuucuggaccgccgugguggccaucgagccccacgugaaccccguggacagacaguacaccaucuucggcgagagcaagcaguucaacgugagcaacgacagcaacaaguggaaguuccuggagauguucagaagcagcagccagaacgaguucuacaacagaagaacccugaccagcgacaccagauucgugggcauccugaaguacggcggcagaguguggaccuuccacggcgagacccccagagccaccaccgacagcagcagcaccgccaaccugaacaacaucagcaucaccauccacagcgaguucuacaucauccccagaagccaggagagcaagugcaacgaguacaucaacaacggccugugaggacuagucccuguucccagagcccacuuuuuuuucuuuuuuugaaauaaaauagccugucuuucagaucucaaaggcucuuuucagagccaccaaaaaaaaaaaaaaaaaaaaaaaaaaaaaaaaaaaaaaaaaaaaaaaaaaaaaaaaaaaaaaaaaaaaaaaaaaaaaaaaaaaaaaaaaaaaaaaaaaaaa

SEQ ID NO: 1324 - RNA, 1313 nt, Artificial Sequence
  mRNA product Design a-1 (hSL-A100) comprising derived and/or modified sequence from RVA/BE1058/P[4]__AEX30665.1__P2_VP8*(65-223)_Ferritin (opt4)
aggagagucccgcagucggcguccagcggcucugcuuguucgugugugugucguugcaggccuuauucaagcuuaccaugcaguacaucaaggccaacagcaaguucaucggcaucaccgagcugggcagcggcagcggccuggacggccccuaccagcccaccaccuucaagccccccaacgacuacuggcugcugaucagcagcaacaccgacggcgugguguacgagagcaccaacaacagcgacuucuggaccgccgugaucgccguggagccccacgugaaccagaccaacagacaguacgugcuguucggcgagaacaagcaguucaacaucgagaacagcagcgacaaguggaaguucuucgagauguucaagggcaacagccagagcgacuucagcaacagaagaacccugaccagcagcaacagacuggugggcaugcugaaguacggcggcagaguguggaccuuccacggcgagacccccagagccaccaccgacagcagcagcaccgccgaccugaacaacaucagcaucaucauccacagcgaguucuacaucauccccagaagccaggagagcaagugcaacgaguacaucaacaacggccugagcggcggcgacaucaucaagcugcugaacgagcaggugaacaaggagaugcagagcagcaaccuguacaugagcaugagcagcuggugcuacacccacagccuggacggcgccggccuguuccuguucgaccacgccgccgaggaguacgagcacgccaagaagcugaucaucuuccugaacgagaacaacgugcccgugcagcugaccagcaucagcgcccccgagcacaaguucgagggccugacccagaucuuccagaaggccuacgagcacgagcagcacaucagcgagagcaucaacaacaucguggaccacgccaucaagagcaaggaccacgccaccuucaacuuccugcagugguacguggccgagcagcacgaggaggaggugcuguucaaggacauccuggacaagaucgagcugaucggcaacgagaaccacggccuguaccuggccgaccaguacgugaagggcaucgccaagagcagaaagagcugaggacuagucccuguucccagagcccacuuuuuuuucuuuuuuugaaauaaaauagccugucuuucagaucucaaaggcucuuuucagagccaccaaaaaaaaaaaaaaaaaaaaaaaaaaaaaaaaaaaaaaaaaaaaaaaaaaaaaaaaaaaaaaaaaaaaaaaaaaaaaaaaaaaaaaaaaaaaaaaaaaaaa

SEQ ID NO: 1325 - RNA, 1313 nt, Artificial Sequence
  mRNA product Design a-1 (hSL-A100) comprising derived and/or modified sequence from RVA/DS-1/P[4]__CAD62680.1__P2_VP8*(65-223)_Ferritin (opt4)
aggagagucccgcagucggcguccagcggcucugcuuguucgugugugugucguugcaggccuuauucaagcuuaccaugcaguacaucaaggccaacagcaaguucaucggcaucaccgagcugggcagcggcagcggccuggacggccccuaccagcccaccaccuucaagccccccaacgacuacuggcugcugaucagcagcaacaccaacggcgugguguacgagagcaccaacaacaacgacuucuggaccgccgugagcagcguggagccccacgugagccagaccaacagacaguacauccuguucggcgagaacaagcaguucaacguggagaacaacagcgacaaguggaaguucuucgagaccuucaccggcagcagccagggcaacuucagcaacagaagaacccugaccagcagcaacagacuggugggcaugcugaaguacggcggcagaguguggaccuuccacggcgagacccccagagccaccaccgacagcagcaacaccgccgaccugaacaacaucagcaucaucauccacagcgaguucuacaucauccccagaagccaggagagcaagugcaacgaguacaucaacaacggccugagcggcggcgacaucaucaagcugcugaacgagcaggugaacaaggagaugcagagcagcaaccuguacaugagcaugagcagcuggugcuacacccacagccuggacggcgccggccuguuccuguucgaccacgccgccgaggaguacgagcacgccaagaagcugaucaucuuccugaacgagaacaacgugcccgugcagcugaccagcaucagcgcccccgagcacaaguucgagggccugacccagaucuuccagaaggccuacgagcacgagcagcacaucagcgagagcaucaacaacaucguggaccacgccaucaagagcaaggaccacgccaccuucaacuuccugcagugguacguggccgagcagcacgaggaggaggugcuguucaaggacauccuggacaagaucgagcugaucggcaacgagaaccacggccuguaccuggccgaccaguacgugaagggcaucgccaagagcagaaagagcugaggacuagucccuguucccagagcccacuuuuuuuucuuuuuuugaaauaaaauagccugucuuucagaucucaaaggcucuuuucagagccaccaaaaaaaaaaaaaaaaaaaaaaaaaaaaaaaaaaaaaaaaaaaaaaaaaaaaaaaaaaaaaaaaaaaaaaaaaaaaaaaaaaaaaaaaaaaaaaaaaaaaa

SEQ ID NO: 1326 - RNA, 1313 nt, Artificial Sequence; identical to SEQ ID NO: 1325
  mRNA product Design a-1 (hSL-A100) comprising derived and/or modified sequence from RVA/DS-1/P[4]__ABV53252.1__P2_VP8*(65-223)_Ferritin (opt4)

SEQ ID NO: 1327 - RNA, 1313 nt, Artificial Sequence
  mRNA product Design a-1 (hSL-A100) comprising derived and/or modified sequence from RVA/F01322/P[6]__AFA51886.1__P2_VP8*(65-223)_Ferritin (opt4)
aggagagucccgcagucggcguccagcggcucugcuuguucgugugugugucguugcaggccuuauucaagcuuaccaugcaguacaucaaggccaacagcaaguucaucggcaucaccgagcugggcagcggcagcggccuggacggccccuaccagcccaccaacuucaagccccccaacgacuacuggauccugcugaaccccaccaaccagcagguggugcuggagggcaccaacaagaccgacaucuggguggcccugcugcugguggagcccaacgugaccaaccagagcagacaguacacccuguucggcgagaccaagcagaucaccguggagaacaacaccaacaaguggaaguucuucgagauguucagaagcagcgugagcgccgaguuccagcacaagagaacccugaccagcgacaccaagcuggccggcuucaugaaguucuacaacagcguguggaccuuccacggcgagacccccaacgccaccaccgacuacagcagcaccagcaaccuguucgagguggagaccgugauccacguggaguucuacaucauccccagaagccaggagagcaagugcagcgaguacaucaacaccggccugagcggcggcgacaucaucaagcugcugaacgagcaggugaacaaggagaugcagagcagcaaccuguacaugagcaugagcagcuggugcuacacccacagccuggacggcgccggccuguuccuguucgaccacgccgccgaggaguacgagcacgccaagaagcugaucaucuuccugaacgagaacaacgugcccgugcagcugaccagcaucagcgcccccgagcacaaguucgagggccugacccagaucuuccagaaggccuacgagcacgagcagcacaucagcgagagcaucaacaacaucguggaccacgccaucaagagcaaggaccacgccaccuucaacuuccugcagugguacguggccgagcagcacgaggaggaggugcuguucaaggacauccuggacaagaucgagcugaucggcaacgagaaccacggccuguaccuggccgaccaguacgugaagggcaucgccaagagcagaaagagcugaggacuagucccuguucccagagcccacuuuuuuuucuuuuuuugaaauaaaauagccugucuuucagaucucaaaggcucuuuucagagccaccaaaaaaaaaaaaaaaaaaaaaaaaaaaaaaaaaaaaaaaaaaaaaaaaaaaaaaaaaaaaaaaaaaaaaaaaaaaaaaaaaaaaaaaaaaaaaaaaaaaaa

SEQ ID NO: 1328 - RNA, 1313 nt, Artificial Sequence
  mRNA product Design a-1 (hSL-A100) comprising derived and/or modified sequence from RVA/1076/P[6]__AAA47337.1__P2_VP8*(65-223)_Ferritin (opt4)
aggagagucccgcagucggcguccagcggcucugcuuguucgugugugugucguugcaggccuuauucaagcuuaccaugcaguacaucaaggccaacagcaaguucaucggcaucaccgagcugggcagcggcagcggccuggacggccccuaccagcccaccagcuucaagccccccagcgacuacuggauccugcugaaccccaccaaccagcagguggugcuggagggcaccaacaagaccgacaucuggguggcccugcugcugguggagcccaacgugaccaaccagagcagacaguacacccuguucggcgagaccaagcagaucaccguggagaacaacaccaacaaguggaaguucuucgagauguucagaagcagcgugagcgccgaguuccagcacaagagaacccugaccagcgacaccaagcuggccggcuuccugaaguucuacaacagcguguggaccuucuacggcgagaccccccacgccaccaccgacuacagcagcaccagcaaccugagcgagguggagaccgccauccacguggaguucuacaucauccccagaagccaggagagcaagugcaacgaguacaucaacaccggccugagcggcggcgacaucaucaagcugcugaacgagcaggugaacaaggagaugcagagcagcaaccuguacaugagcaugagcagcuggugcuacacccacagccuggacggcgccggccuguuccuguucgaccacgccgccgaggaguacgagcacgccaagaagcugaucaucuuccugaacgagaacaacgugcccgugcagcugaccagcaucagcgcccccgagcacaaguucgagggccugacccagaucuuccagaaggccuacgagcacgagcagcacaucagcgagagcaucaacaacaucguggaccacgccaucaagagcaaggaccacgccaccuucaacuuccugcagugguacguggccgagcagcacgaggaggaggugcuguucaaggacauccuggacaagaucgagcugaucggcaacgagaaccacggccuguaccuggccgaccaguacgugaagggcaucgccaagagcagaaagagcugaggacuagucccuguucccagagcccacuuuuuuuucuuuuuuugaaauaaaauagccugucuuucagaucucaaaggcucuuuucagagccaccaaaaaaaaaaaaaaaaaaaaaaaaaaaaaaaaaaaaaaaaaaaaaaaaaaaaaaaaaaaaaaaaaaaaaaaaaaaaaaaaaaaaaaaaaaaaaaaaaaaaa

SEQ ID NO: 1329 - RNA, 1313 nt, Artificial Sequence
  mRNA product Design a-1 (hSL-A100) comprising derived and/or modified sequence from RVA/BE1128/P[8]__AEX30671.1__P2_VP8*(65-223)_Ferritin (opt4)
aggagagucccgcagucggcguccagcggcucugcuuguucgugugugugucguugcaggccuuauucaagcuuaccaugcaguacaucaaggccaacagcaaguucaucggcaucaccgagcugggcagcggcagcggccuggacggccccuaccagcccaccaccuucaccccccccaccgacuacuggauccugaucaccagcaacaccaacggcgugguguacgagagcaccaacaacagcgacuucuggaccgccgugaucgccguggagccccacgugaaccccguggacagacaguacaacguguucggcgagaacaagcaguucaacgugagaaacgacagcgacaaguggaaguuccuggagauguucagaggcagcagccagaacgacuucuacaacagaagaacccugaccagcgacaccagacuggugggcauccugaaguacggcggcagaguguggaccuuccacggcgagacccccagagccaccaccgacagcagcaacaccgccaaccuggacggcaucagcaucaccauccacagcgaguucuacaucauccccagaagccaggagagcaagugcaacgaguacaucaacaacggccugagcggcggcgacaucaucaagcugcugaacgagcaggugaacaaggagaugcagagcagcaaccuguacaugagcaugagcagcuggugcuacacccacagccuggacggcgccggccuguuccuguucgaccacgccgccgaggaguacgagcacgccaagaagcugaucaucuuccugaacgagaacaacgugcccgugcagcugaccagcaucagcgcccccgagcacaaguucgagggccugacccagaucuuccagaaggccuacgagcacgagcagcacaucagcgagagcaucaacaacaucguggaccacgccaucaagagcaaggaccacgccaccuucaacuuccugcagugguacguggccgagcagcacgaggaggaggugcuguucaaggacauccuggacaagaucgagcugaucggcaacgagaaccacggccuguaccuggccgaccaguacgugaagggcaucgccaagagcagaaagagcugaggacuagucccuguucccagagcccacuuuuuuuucuuuuuuugaaauaaaauagccugucuuucagaucucaaaggcucuuuucagagccaccaaaaaaaaaaaaaaaaaaaaaaaaaaaaaaaaaaaaaaaaaaaaaaaaaaaaaaaaaaaaaaaaaaaaaaaaaaaaaaaaaaaaaaaaaaaaaaaaaaaaa

SEQ ID NO: 1330 - RNA, 1313 nt, Artificial Sequence
  mRNA product Design a-1 (hSL-A100) comprising derived and/or modified sequence from RVA/Wa-VirWa/P[8]__ACR22783.1__P2_VP8*(65-223)_Ferritin (opt4)
aggagagucccgcagucggcguccagcggcucugcuuguucgugugugugucguugcaggccuuauucaagcuuaccaugcaguacaucaaggccaacagcaaguucaucggcaucaccgagcugggcagcggcagcggccuggacggccccuaccagcccaccaccuucaccccccccaacgacuacuggauccugaucaacagcaacaccaacggcgugguguacgagagcaccaacaacagcgacuucuggaccgccgugguggccaucgagccccacgugaaccccguggacagacaguacaccaucuucggcgagagcaagcaguucaacgugagaaacgacagcaacaaguggaaguuccuggagauguucagaagcagcagccagaacgaguucuacaacagaagaacccugaccagcgacaccagacuggugggcauccugaaguacggcggcagaguguggaccuuccacggcgagacccccagagccaccaccgacagcagcagcaccgccaaccugaacaacaucagcaucaccauccacagcgaguucuacaucauccccagaagccaggagagcaagugcaacgaguacaucaacaacggccugagcggcggcgacaucaucaagcugcugaacgagcaggugaacaaggagaugcagagcagcaaccuguacaugagcaugagcagcuggugcuacacccacagccuggacggcgccggccuguuccuguucgaccacgccgccgaggaguacgagcacgccaagaagcugaucaucuuccugaacgagaacaacgugcccgugcagcugaccagcaucagcgcccccgagcacaaguucgagggccugacccagaucuuccagaaggccuacgagcacgagcagcacaucagcgagagcaucaacaacaucguggaccacgccaucaagagcaaggaccacgccaccuucaacuuccugcagugguacguggccgagcagcacgaggaggaggugcuguucaaggacauccuggacaagaucgagcugaucggcaacgagaaccacggccuguaccuggccgaccaguacgugaagggcaucgccaagagcagaaagagcugaggacuagucccuguucccagagcccacuuuuuuuucuuuuuuugaaauaaaauagccugucuuucagaucucaaaggcucuuuucagagccaccaaaaaaaaaaaaaaaaaaaaaaaaaaaaaaaaaaaaaaaaaaaaaaaaaaaaaaaaaaaaaaaaaaaaaaaaaaaaaaaaaaaaaaaaaaaaaaaaaaaaa

SEQ ID NO: 1331 - RNA, 1313 nt, Artificial Sequence
  mRNA product Design a-1 (hSL-A100) comprising derived and/or modified sequence from RVA/Wa/P[8]__AAA47290.1__P2_VP8*(65-223)_Ferritin (opt4)
aggagagucccgcagucggcguccagcggcucugcuuguucgugugugugucguugcaggccuuauucaagcuuaccaugcaguacaucaaggccaacagcaaguucaucggcaucaccgagcugggcagcggcagcggccuggacggccccuaccagcccaccaccuucaccccccccaacgacuacuggauccugaucaacagcaacaccaacggcgugguguacgagagcaccaacaacagcgacuucuggaccgccgugguggccaucgagccccacgugaaccccguggacagacaguacaccaucuucggcgagagcaagcaguucaacgugagcaacgacagcaacaaguggaaguuccuggagauguucagaagcagcagccagaacgaguucuacaacagaagaacccugaccagcgacaccagauucgugggcauccugaaguacggcggcagaguguggaccuuccacggcgagacccccagagccaccaccgacagcagcagcaccgccaaccugaacaacaucagcaucaccauccacagcgaguucuacaucauccccagaagccaggagagcaagugcaacgaguacaucaacaacggccugagcggcggcgacaucaucaagcugcugaacgagcaggugaacaaggagaugcagagcagcaaccuguacaugagcaugagcagcuggugcuacacccacagccuggacggcgccggccuguuccuguucgaccacgccgccgaggaguacgagcacgccaagaagcugaucaucuuccugaacgagaacaacgugcccgugcagcugaccagcaucagcgcccccgagcacaaguucgagggccugacccagaucuuccagaaggccuacgagcacgagcagcacaucagcgagagcaucaacaacaucguggaccacgccaucaagagcaaggaccacgccaccuucaacuuccugcagugguacguggccgagcagcacgaggaggaggugcuguucaaggacauccuggacaagaucgagcugaucggcaacgagaaccacggccuguaccuggccgaccaguacgugaagggcaucgccaagagcagaaagagcugaggacuagucccuguucccagagcccacuuuuuuuucuuuuuuugaaauaaaauagccugucuuucagaucucaaaggcucuuuucagagccaccaaaaaaaaaaaaaaaaaaaaaaaaaaaaaaaaaaaaaaaaaaaaaaaaaaaaaaaaaaaaaaaaaaaaaaaaaaaaaaaaaaaaaaaaaaaaaaaaaaaaa

SEQ ID NO: 1332 - RNA, 1313 nt, Artificial Sequence; identical to SEQ ID NO: 1331
  mRNA product Design a-1 (hSL-A100) comprising derived and/or modified sequence from RVA/Wa/P[8]__AAA66953.1__P2_VP8*(65-223)_Ferritin (opt4)

SEQ ID NO: 1333 - RNA, 1385 nt, Artificial Sequence
  mRNA product Design a-1 (hSL-A100) comprising derived and/or modified sequence from RVA/BE1058/P[4]__AEX30665.1__P2_VP8*(41-223)_Ferritin (opt4)
aggagagucccgcagucggcguccagcggcucugcuuguucgugugugugucguugcaggccuuauucaagcuuaccaugcaguacaucaaggccaacagcaaguucaucggcaucaccgagcugggcagcggcagcggcgcccagaccagauacgcccccgugaacuggggccacggcgagaucaacgacagcaccaccguggagcccgugcuggacggccccuaccagcccaccaccuucaagccccccaacgacuacuggcugcugaucagcagcaacaccgacggcgugguguacgagagcaccaacaacagcgacuucuggaccgccgugaucgccguggagccccacgugaaccagaccaacagacaguacgugcuguucggcgagaacaagcaguucaacaucgagaacagcagcgacaaguggaaguucuucgagauguucaagggcaacagccagagcgacuucagcaacagaagaacccugaccagcagcaacagacuggugggcaugcugaaguacggcggcagaguguggaccuuccacggcgagacccccagagccaccaccgacagcagcagcaccgccgaccugaacaacaucagcaucaucauccacagcgaguucuacaucauccccagaagccaggagagcaagugcaacgaguacaucaacaacggccugagcggcggcgacaucaucaagcugcugaacgagcaggugaacaaggagaugcagagcagcaaccuguacaugagcaugagcagcuggugcuacacccacagccuggacggcgccggccuguuccuguucgaccacgccgccgaggaguacgagcacgccaagaagcugaucaucuuccugaacgagaacaacgugcccgugcagcugaccagcaucagcgcccccgagcacaaguucgagggccugacccagaucuuccagaaggccuacgagcacgagcagcacaucagcgagagcaucaacaacaucguggaccacgccaucaagagcaaggaccacgccaccuucaacuuccugcagugguacguggccgagcagcacgaggaggaggugcuguucaaggacauccuggacaagaucgagcugaucggcaacgagaaccacggccuguaccuggccgaccaguacgugaagggcaucgccaagagcagaaagagcugaggacuagucccuguucccagagcccacuuuuuuuucuuuuuuugaaauaaaauagccugucuuucagaucucaaaggcucuuuucagagccaccaaaaaaaaaaaaaaaaaaaaaaaaaaaaaaaaaaaaaaaaaaaaaaaaaaaaaaaaaaaaaaaaaaaaaaaaaaaaaaaaaaaaaaaaaaaaaaaaaaaaa

SEQ ID NO: 1334 - RNA, 1385 nt, Artificial Sequence
  mRNA product Design a-1 (hSL-A100) comprising derived and/or modified sequence from RVA/DS-1/P[4]__CAD62680.1__P2_VP8*(41-223)_Ferritin (opt4)
aggagagucccgcagucggcguccagcggcucugcuuguucgugugugugucguugcaggccuuauucaagcuuaccaugcaguacaucaaggccaacagcaaguucaucggcaucaccgagcugggcagcggcagcggcgcccagaccagauacgcccccgugaacuggggcagcugggagaucaacgacagcaccaccguggagcccgugcuggacggccccuaccagcccaccaccuucaagccccccaacgacuacuggcugcugaucagcagcaacaccaacggcgugguguacgagagcaccaacaacaacgacuucuggaccgccgugagcagcguggagccccacgugagccagaccaacagacaguacauccuguucggcgagaacaagcaguucaacguggagaacaacagcgacaaguggaaguucuucgagaccuucaccggcagcagccagggcaacuucagcaacagaagaacccugaccagcagcaacagacuggugggcaugcugaaguacggcggcagaguguggaccuuccacggcgagacccccagagccaccaccgacagcagcaacaccgccgaccugaacaacaucagcaucaucauccacagcgaguucuacaucauccccagaagccaggagagcaagugcaacgaguacaucaacaacggccugagcggcggcgacaucaucaagcugcugaacgagcaggugaacaaggagaugcagagcagcaaccuguacaugagcaugagcagcuggugcuacacccacagccuggacggcgccggccuguuccuguucgaccacgccgccgaggaguacgagcacgccaagaagcugaucaucuuccugaacgagaacaacgugcccgugcagcugaccagcaucagcgcccccgagcacaaguucgagggccugacccagaucuuccagaaggccuacgagcacgagcagcacaucagcgagagcaucaacaacaucguggaccacgccaucaagagcaaggaccacgccaccuucaacuuccugcagugguacguggccgagcagcacgaggaggaggugcuguucaaggacauccuggacaagaucgagcugaucggcaacgagaaccacggccuguaccuggccgaccaguacgugaagggcaucgccaagagcagaaagagcugaggacuagucccuguucccagagcccacuuuuuuuucuuuuuuugaaauaaaauagccugucuuucagaucucaaaggcucuuuucagagccaccaaaaaaaaaaaaaaaaaaaaaaaaaaaaaaaaaaaaaaaaaaaaaaaaaaaaaaaaaaaaaaaaaaaaaaaaaaaaaaaaaaaaaaaaaaaaaaaaaaaaa

SEQ ID NO: 1335 - RNA, 1385 nt, Artificial Sequence; identical to SEQ ID NO: 1334
  mRNA product Design a-1 (hSL-A100) comprising derived and/or modified sequence from RVA/DS-1/P[4]__ABV53252.1__P2_VP8*(41-223)_Ferritin (opt4)

SEQ ID NO: 1336 - RNA, 1385 nt, Artificial Sequence
  mRNA product Design a-1 (hSL-A100) comprising derived and/or modified sequence from RVA/F01322/P[6]__AFA51886.1__P2_VP8*(41-223)_Ferritin (opt4)
aggagagucccgcagucggcguccagcggcucugcuuguucgugugugugucguugcaggccuuauucaagcuuaccaugcaguacaucaaggccaacagcaaguucaucggcaucaccgagcugggcagcggcagcggcgcccagaccaacuacgcccccgugaccuggagccacggcgaggugaacgacagcaccaccaucgagcccgugcuggacggccccuaccagcccaccaacuucaagccccccaacgacuacuggauccugcugaaccccaccaaccagcagguggugcuggagggcaccaacaagaccgacaucuggguggcccugcugcugguggagcccaacgugaccaaccagagcagacaguacacccuguucggcgagaccaagcagaucaccguggagaacaacaccaacaaguggaaguucuucgagauguucagaagcagcgugagcgccgaguuccagcacaagagaacccugaccagcgacaccaagcuggccggcuucaugaaguucuacaacagcguguggaccuuccacggcgagacccccaacgccaccaccgacuacagcagcaccagcaaccuguucgagguggagaccgugauccacguggaguucuacaucauccccagaagccaggagagcaagugcagcgaguacaucaacaccggccugagcggcggcgacaucaucaagcugcugaacgagcaggugaacaaggagaugcagagcagcaaccuguacaugagcaugagcagcuggugcuacacccacagccuggacggcgccggccuguuccuguucgaccacgccgccgaggaguacgagcacgccaagaagcugaucaucuuccugaacgagaacaacgugcccgugcagcugaccagcaucagcgcccccgagcacaaguucgagggccugacccagaucuuccagaaggccuacgagcacgagcagcacaucagcgagagcaucaacaacaucguggaccacgccaucaagagcaaggaccacgccaccuucaacuuccugcagugguacguggccgagcagcacgaggaggaggugcuguucaaggacauccuggacaagaucgagcugaucggcaacgagaaccacggccuguaccuggccgaccaguacgugaagggcaucgccaagagcagaaagagcugaggacuagucccuguucccagagcccacuuuuuuuucuuuuuuugaaauaaaauagccugucuuucagaucucaaaggcucuuuucagagccaccaaaaaaaaaaaaaaaaaaaaaaaaaaaaaaaaaaaaaaaaaaaaaaaaaaaaaaaaaaaaaaaaaaaaaaaaaaaaaaaaaaaaaaaaaaaaaaaaaaaaa

SEQ ID NO: 1337 - RNA, 1385 nt, Artificial Sequence
  mRNA product Design a-1 (hSL-A100) comprising derived and/or modified sequence from RVA/1076/P[6]__AAA47337.1__P2_VP8*(41-223)_Ferritin (opt4)
aggagagucccgcagucggcguccagcggcucugcuuguucgugugugugucguugcaggccuuauucaagcuuaccaugcaguacaucaaggccaacagcaaguucaucggcaucaccgagcugggcagcggcagcggcgcccagaccaacuacgcccccgugaccuggagccacggcgaggugaacgacagcaccaccaucgagcccgugcuggacggccccuaccagcccaccagcuucaagccccccagcgacuacuggauccugcugaaccccaccaaccagcagguggugcuggagggcaccaacaagaccgacaucuggguggcccugcugcugguggagcccaacgugaccaaccagagcagacaguacacccuguucggcgagaccaagcagaucaccguggagaacaacaccaacaaguggaaguucuucgagauguucagaagcagcgugagcgccgaguuccagcacaagagaacccugaccagcgacaccaagcuggccggcuuccugaaguucuacaacagcguguggaccuucuacggcgagaccccccacgccaccaccgacuacagcagcaccagcaaccugagcgagguggagaccgccauccacguggaguucuacaucauccccagaagccaggagagcaagugcaacgaguacaucaacaccggccugagcggcggcgacaucaucaagcugcugaacgagcaggugaacaaggagaugcagagcagcaaccuguacaugagcaugagcagcuggugcuacacccacagccuggacggcgccggccuguuccuguucgaccacgccgccgaggaguacgagcacgccaagaagcugaucaucuuccugaacgagaacaacgugcccgugcagcugaccagcaucagcgcccccgagcacaaguucgagggccugacccagaucuuccagaaggccuacgagcacgagcagcacaucagcgagagcaucaacaacaucguggaccacgccaucaagagcaaggaccacgccaccuucaacuuccugcagugguacguggccgagcagcacgaggaggaggugcuguucaaggacauccuggacaagaucgagcugaucggcaacgagaaccacggccuguaccuggccgaccaguacgugaagggcaucgccaagagcagaaagagcugaggacuagucccuguucccagagcccacuuuuuuuucuuuuuuugaaauaaaauagccugucuuucagaucucaaaggcucuuuucagagccaccaaaaaaaaaaaaaaaaaaaaaaaaaaaaaaaaaaaaaaaaaaaaaaaaaaaaaaaaaaaaaaaaaaaaaaaaaaaaaaaaaaaaaaaaaaaaaaaaaaaaa

SEQ ID NO: 1338 - RNA, 1385 nt, Artificial Sequence
  mRNA product Design a-1 (hSL-A100) comprising derived and/or modified sequence from RVA/BE1128/P[8]__AEX30671.1__P2_VP8*(41-223)_Ferritin (opt4)
aggagagucccgcagucggcguccagcggcucugcuuguucgugugugugucguugcaggccuuauucaagcuuaccaugcaguacaucaaggccaacagcaaguucaucggcaucaccgagcugggcagcggcagcggcgcccagaccagauacgcccccgugaacuggggccacggcgagaucaacgacagcaccaccguggagcccauccuggacggccccuaccagcccaccaccuucaccccccccaccgacuacuggauccugaucaccagcaacaccaacggcgugguguacgagagcaccaacaacagcgacuucuggaccgccgugaucgccguggagccccacgugaaccccguggacagacaguacaacguguucggcgagaacaagcaguucaacgugagaaacgacagcgacaaguggaaguuccuggagauguucagaggcagcagccagaacgacuucuacaacagaagaacccugaccagcgacaccagacuggugggcauccugaaguacggcggcagaguguggaccuuccacggcgagacccccagagccaccaccgacagcagcaacaccgccaaccuggacggcaucagcaucaccauccacagcgaguucuacaucauccccagaagccaggagagcaagugcaacgaguacaucaacaacggccugagcggcggcgacaucaucaagcugcugaacgagcaggugaacaaggagaugcagagcagcaaccuguacaugagcaugagcagcuggugcuacacccacagccuggacggcgccggccuguuccuguucgaccacgccgccgaggaguacgagcacgccaagaagcugaucaucuuccugaacgagaacaacgugcccgugcagcugaccagcaucagcgcccccgagcacaaguucgagggccugacccagaucuuccagaaggccuacgagcacgagcagcacaucagcgagagcaucaacaacaucguggaccacgccaucaagagcaaggaccacgccaccuucaacuuccugcagugguacguggccgagcagcacgaggaggaggugcuguucaaggacauccuggacaagaucgagcugaucggcaacgagaaccacggccuguaccuggccgaccaguacgugaagggcaucgccaagagcagaaagagcugaggacuagucccuguucccagagcccacuuuuuuuucuuuuuuugaaauaaaauagccugucuuucagaucucaaaggcucuuuucagagccaccaaaaaaaaaaaaaaaaaaaaaaaaaaaaaaaaaaaaaaaaaaaaaaaaaaaaaaaaaaaaaaaaaaaaaaaaaaaaaaaaaaaaaaaaaaaaaaaaaaaaa

SEQ ID NO: 1339 - RNA, 1385 nt, Artificial Sequence
  mRNA product Design a-1 (hSL-A100) comprising derived and/or modified sequence from RVA/Wa-VirWa/P[8]__ACR22783.1__P2_VP8*(41-223)_Ferritin (opt4)
aggagagucccgcagucggcguccagcggcucugcuuguucgugugugugucguugcaggccuuauucaagcuuaccaugcaguacaucaaggccaacagcaaguucaucggcaucaccgagcugggcagcggcagcggcgcccagaccagauacgcccccgugaacuggggccacggcgagaucaacgacagcaccaccguggagcccauccuggacggccccuaccagcccaccaccuucaccccccccaacgacuacuggauccugaucaacagcaacaccaacggcgugguguacgagagcaccaacaacagcgacuucuggaccgccgugguggccaucgagccccacgugaaccccguggacagacaguacaccaucuucggcgagagcaagcaguucaacgugagaaacgacagcaacaaguggaaguuccuggagauguucagaagcagcagccagaacgaguucuacaacagaagaacccugaccagcgacaccagacuggugggcauccugaaguacggcggcagaguguggaccuuccacggcgagacccccagagccaccaccgacagcagcagcaccgccaaccugaacaacaucagcaucaccauccacagcgaguucuacaucauccccagaagccaggagagcaagugcaacgaguacaucaacaacggccugagcggcggcgacaucaucaagcugcugaacgagcaggugaacaaggagaugcagagcagcaaccuguacaugagcaugagcagcuggugcuacacccacagccuggacggcgccggccuguuccuguucgaccacgccgccgaggaguacgagcacgccaagaagcugaucaucuuccugaacgagaacaacgugcccgugcagcugaccagcaucagcgcccccgagcacaaguucgagggccugacccagaucuuccagaaggccuacgagcacgagcagcacaucagcgagagcaucaacaacaucguggaccacgccaucaagagcaaggaccacgccaccuucaacuuccugcagugguacguggccgagcagcacgaggaggaggugcuguucaaggacauccuggacaagaucgagcugaucggcaacgagaaccacggccuguaccuggccgaccaguacgugaagggcaucgccaagagcagaaagagcugaggacuagucccuguucccagagcccacuuuuuuuucuuuuuuugaaauaaaauagccugucuuucagaucucaaaggcucuuuucagagccaccaaaaaaaaaaaaaaaaaaaaaaaaaaaaaaaaaaaaaaaaaaaaaaaaaaaaaaaaaaaaaaaaaaaaaaaaaaaaaaaaaaaaaaaaaaaaaaaaaaaaa

SEQ ID NO: 1340 - RNA, 1385 nt, Artificial Sequence
  mRNA product Design a-1 (hSL-A100) comprising derived and/or modified sequence from RVA/Wa/P[8]__AAA47290.1__P2_VP8*(41-223)_Ferritin (opt4)
aggagagucccgcagucggcguccagcggcucugcuuguucgugugugugucguugcaggccuuauucaagcuuaccaugcaguacaucaaggccaacagcaaguucaucggcaucaccgagcugggcagcggcagcggcgcccagaccagauacgcccccgugaacuggggccacggcgagaucaacgacagcaccaccguggagcccauccuggacggccccuaccagcccaccaccuucaccccccccaacgacuacuggauccugaucaacagcaacaccaacggcgugguguacgagagcaccaacaacagcgacuucuggaccgccgugguggccaucgagccccacgugaaccccguggacagacaguacaccaucuucggcgagagcaagcaguucaacgugagcaacgacagcaacaaguggaaguuccuggagauguucagaagcagcagccagaacgaguucuacaacagaagaacccugaccagcgacaccagauucgugggcauccugaaguacggcggcagaguguggaccuuccacggcgagacccccagagccaccaccgacagcagcagcaccgccaaccugaacaacaucagcaucaccauccacagcgaguucuacaucauccccagaagccaggagagcaagugcaacgaguacaucaacaacggccugagcggcggcgacaucaucaagcugcugaacgagcaggugaacaaggagaugcagagcagcaaccuguacaugagcaugagcagcuggugcuacacccacagccuggacggcgccggccuguuccuguucgaccacgccgccgaggaguacgagcacgccaagaagcugaucaucuuccugaacgagaacaacgugcccgugcagcugaccagcaucagcgcccccgagcacaaguucgagggccugacccagaucuuccagaaggccuacgagcacgagcagcacaucagcgagagcaucaacaacaucguggaccacgccaucaagagcaaggaccacgccaccuucaacuuccugcagugguacguggccgagcagcacgaggaggaggugcuguucaaggacauccuggacaagaucgagcugaucggcaacgagaaccacggccuguaccuggccgaccaguacgugaagggcaucgccaagagcagaaagagcugaggacuagucccuguucccagagcccacuuuuuuuucuuuuuuugaaauaaaauagccugucuuucagaucucaaaggcucuuuucagagccaccaaaaaaaaaaaaaaaaaaaaaaaaaaaaaaaaaaaaaaaaaaaaaaaaaaaaaaaaaaaaaaaaaaaaaaaaaaaaaaaaaaaaaaaaaaaaaaaaaaaaa

SEQ ID NO: 1341 - RNA, 1385 nt, Artificial Sequence
  mRNA product Design a-1 (hSL-A100) comprising derived and/or modified sequence from RVA/Wa/P[8]__AAA66953.1__P2_VP8*(41-223)_Ferritin (opt4)
aggagagucccgcagucggcguccagcggcucugcuuguucgugugugugucguugcaggccuuauucaagcuuaccaugcaguacaucaaggccaacagcaaguucaucggcaucaccgagcugggcagcggcagcggcgcccagaccagauacgcccccgugaacuggggccacggcgagaucaacgacagcaccaccguggagcccaugcuggacggccccuaccagcccaccaccuucaccccccccaacgacuacuggauccugaucaacagcaacaccaacggcgugguguacgagagcaccaacaacagcgacuucuggaccgccgugguggccaucgagccccacgugaaccccguggacagacaguacaccaucuucggcgagagcaagcaguucaacgugagcaacgacagcaacaaguggaaguuccuggagauguucagaagcagcagccagaacgaguucuacaacagaagaacccugaccagcgacaccagauucgugggcauccugaaguacggcggcagaguguggaccuuccacggcgagacccccagagccaccaccgacagcagcagcaccgccaaccugaacaacaucagcaucaccauccacagcgaguucuacaucauccccagaagccaggagagcaagugcaacgaguacaucaacaacggccugagcggcggcgacaucaucaagcugcugaacgagcaggugaacaaggagaugcagagcagcaaccuguacaugagcaugagcagcuggugcuacacccacagccuggacggcgccggccuguuccuguucgaccacgccgccgaggaguacgagcacgccaagaagcugaucaucuuccugaacgagaacaacgugcccgugcagcugaccagcaucagcgcccccgagcacaaguucgagggccugacccagaucuuccagaaggccuacgagcacgagcagcacaucagcgagagcaucaacaacaucguggaccacgccaucaagagcaaggaccacgccaccuucaacuuccugcagugguacguggccgagcagcacgaggaggaggugcuguucaaggacauccuggacaagaucgagcugaucggcaacgagaaccacggccuguaccuggccgaccaguacgugaagggcaucgccaagagcagaaagagcugaggacuagucccuguucccagagcccacuuuuuuuucuuuuuuugaaauaaaauagccugucuuucagaucucaaaggcucuuuucagagccaccaaaaaaaaaaaaaaaaaaaaaaaaaaaaaaaaaaaaaaaaaaaaaaaaaaaaaaaaaaaaaaaaaaaaaaaaaaaaaaaaaaaaaaaaaaaaaaaaaaaaa

SEQ ID NO: 1342 - RNA, 1319 nt, Artificial Sequence
  mRNA product Design a-1 (hSL-A100) comprising derived and/or modified sequence from RVA/BE1058/P[4]__AEX30665.1__LumSynt_P2_VP8*(65-223) (opt4)
aggagagucccgcagucggcguccagcggcucugcuuguucgugugugugucguugcaggccuuauucaagcuuaccaugcagaucuacgagggcaagcugaccgccgagggccugagauucggcaucguggccagcagauucaaccacgcccugguggacagacugguggagggcgccaucgacgccaucgugagacacggcggcagagaggaggacaucacccuggugagagugcccggcagcugggagauccccguggccgccggcgagcuggccagaaaggaggacaucgacgccgugaucgccaucggcgugcugaucagaggcgccaccccccacuucgacuacaucgccagcgaggugagcaagggccuggccgaccugagccuggagcugagaaagcccaucaccuucggcgugaucaccgccgacacccuggagcaggccaucgagagagccggcaccaagcacggcaacaagggcugggaggccgcccugagcgccaucgagauggccaaccuguucaagagccugagaggcggcagcggcggcagcggcggcagcggcggcagcggcggcggccaguacaucaaggccaacagcaaguucaucggcaucaccgagcugggcagcggcagcggccuggacggccccuaccagcccaccaccuucaagccccccaacgacuacuggcugcugaucagcagcaacaccgacggcgugguguacgagagcaccaacaacagcgacuucuggaccgccgugaucgccguggagccccacgugaaccagaccaacagacaguacgugcuguucggcgagaacaagcaguucaacaucgagaacagcagcgacaaguggaaguucuucgagauguucaagggcaacagccagagcgacuucagcaacagaagaacccugaccagcagcaacagacuggugggcaugcugaaguacggcggcagaguguggaccuuccacggcgagacccccagagccaccaccgacagcagcagcaccgccgaccugaacaacaucagcaucaucauccacagcgaguucuacaucauccccagaagccaggagagcaagugcaacgaguacaucaacaacggccugugaggacuagucccuguucccagagcccacuuuuuuuucuuuuuuugaaauaaaauagccugucuuucagaucucaaaggcucuuuucagagccaccaaaaaaaaaaaaaaaaaaaaaaaaaaaaaaaaaaaaaaaaaaaaaaaaaaaaaaaaaaaaaaaaaaaaaaaaaaaaaaaaaaaaaaaaaaaaaaaaaaaaa

SEQ ID NO: 1343 - RNA, 1319 nt, Artificial Sequence
  mRNA product Design a-1 (hSL-A100) comprising derived and/or modified sequence from RVA/DS-1/P[4]__CAD62680.1__LumSynt_P2_VP8*(65-223) (opt4)
aggagagucccgcagucggcguccagcggcucugcuuguucgugugugugucguugcaggccuuauucaagcuuaccaugcagaucuacgagggcaagcugaccgccgagggccugagauucggcaucguggccagcagauucaaccacgcccugguggacagacugguggagggcgccaucgacgccaucgugagacacggcggcagagaggaggacaucacccuggugagagugcccggcagcugggagauccccguggccgccggcgagcuggccagaaaggaggacaucgacgccgugaucgccaucggcgugcugaucagaggcgccaccccccacuucgacuacaucgccagcgaggugagcaagggccuggccgaccugagccuggagcugagaaagcccaucaccuucggcgugaucaccgccgacacccuggagcaggccaucgagagagccggcaccaagcacggcaacaagggcugggaggccgcccugagcgccaucgagauggccaaccuguucaagagccugagaggcggcagcggcggcagcggcggcagcggcggcagcggcggcggccaguacaucaaggccaacagcaaguucaucggcaucaccgagcugggcagcggcagcggccuggacggccccuaccagcccaccaccuucaagccccccaacgacuacuggcugcugaucagcagcaacaccaacggcgugguguacgagagcaccaacaacaacgacuucuggaccgccgugagcagcguggagccccacgugagccagaccaacagacaguacauccuguucggcgagaacaagcaguucaacguggagaacaacagcgacaaguggaaguucuucgagaccuucaccggcagcagccagggcaacuucagcaacagaagaacccugaccagcagcaacagacuggugggcaugcugaaguacggcggcagaguguggaccuuccacggcgagacccccagagccaccaccgacagcagcaacaccgccgaccugaacaacaucagcaucaucauccacagcgaguucuacaucauccccagaagccaggagagcaagugcaacgaguacaucaacaacggccugugaggacuagucccuguucccagagcccacuuuuuuuucuuuuuuugaaauaaaauagccugucuuucagaucucaaaggcucuuuucagagccaccaaaaaaaaaaaaaaaaaaaaaaaaaaaaaaaaaaaaaaaaaaaaaaaaaaaaaaaaaaaaaaaaaaaaaaaaaaaaaaaaaaaaaaaaaaaaaaaaaaaaa

SEQ ID NO: 1344 - RNA, 1319 nt, Artificial Sequence; identical to SEQ ID NO: 1343
  mRNA product Design a-1 (hSL-A100) comprising derived and/or modified sequence from RVA/DS-1/P[4]__ABV53252.1__LumSynt_P2_VP8*(65-223) (opt4)

SEQ ID NO: 1345 - RNA, 1319 nt, Artificial Sequence
  mRNA product Design a-1 (hSL-A100) comprising derived and/or modified sequence from RVA/F01322/P[6]__AFA51886.1__LumSynt_P2_VP8*(65-223) (opt4)
aggagagucccgcagucggcguccagcggcucugcuuguucgugugugugucguugcaggccuuauucaagcuuaccaugcagaucuacgagggcaagcugaccgccgagggccugagauucggcaucguggccagcagauucaaccacgcccugguggacagacugguggagggcgccaucgacgccaucgugagacacggcggcagagaggaggacaucacccuggugagagugcccggcagcugggagauccccguggccgccggcgagcuggccagaaaggaggacaucgacgccgugaucgccaucggcgugcugaucagaggcgccaccccccacuucgacuacaucgccagcgaggugagcaagggccuggccgaccugagccuggagcugagaaagcccaucaccuucggcgugaucaccgccgacacccuggagcaggccaucgagagagccggcaccaagcacggcaacaagggcugggaggccgcccugagcgccaucgagauggccaaccuguucaagagccugagaggcggcagcggcggcagcggcggcagcggcggcagcggcggcggccaguacaucaaggccaacagcaaguucaucggcaucaccgagcugggcagcggcagcggccuggacggccccuaccagcccaccaacuucaagccccccaacgacuacuggauccugcugaaccccaccaaccagcagguggugcuggagggcaccaacaagaccgacaucuggguggcccugcugcugguggagcccaacgugaccaaccagagcagacaguacacccuguucggcgagaccaagcagaucaccguggagaacaacaccaacaaguggaaguucuucgagauguucagaagcagcgugagcgccgaguuccagcacaagagaacccugaccagcgacaccaagcuggccggcuucaugaaguucuacaacagcguguggaccuuccacggcgagacccccaacgccaccaccgacuacagcagcaccagcaaccuguucgagguggagaccgugauccacguggaguucuacaucauccccagaagccaggagagcaagugcagcgaguacaucaacaccggccugugaggacuagucccuguucccagagcccacuuuuuuuucuuuuuuugaaauaaaauagccugucuuucagaucucaaaggcucuuuucagagccaccaaaaaaaaaaaaaaaaaaaaaaaaaaaaaaaaaaaaaaaaaaaaaaaaaaaaaaaaaaaaaaaaaaaaaaaaaaaaaaaaaaaaaaaaaaaaaaaaaaaaa

SEQ ID NO: 1346 - RNA, 1319 nt, Artificial Sequence
  mRNA product Design a-1 (hSL-A100) comprising derived and/or modified sequence from RVA/1076/P[6]__AAA47337.1__LumSynt_P2_VP8*(65-223) (opt4)
aggagagucccgcagucggcguccagcggcucugcuuguucgugugugugucguugcaggccuuauucaagcuuaccaugcagaucuacgagggcaagcugaccgccgagggccugagauucggcaucguggccagcagauucaaccacgcccugguggacagacugguggagggcgccaucgacgccaucgugagacacggcggcagagaggaggacaucacccuggugagagugcccggcagcugggagauccccguggccgccggcgagcuggccagaaaggaggacaucgacgccgugaucgccaucggcgugcugaucagaggcgccaccccccacuucgacuacaucgccagcgaggugagcaagggccuggccgaccugagccuggagcugagaaagcccaucaccuucggcgugaucaccgccgacacccuggagcaggccaucgagagagccggcaccaagcacggcaacaagggcugggaggccgcccugagcgccaucgagauggccaaccuguucaagagccugagaggcggcagcggcggcagcggcggcagcggcggcagcggcggcggccaguacaucaaggccaacagcaaguucaucggcaucaccgagcugggcagcggcagcggccuggacggccccuaccagcccaccagcuucaagccccccagcgacuacuggauccugcugaaccccaccaaccagcagguggugcuggagggcaccaacaagaccgacaucuggguggcccugcugcugguggagcccaacgugaccaaccagagcagacaguacacccuguucggcgagaccaagcagaucaccguggagaacaacaccaacaaguggaaguucuucgagauguucagaagcagcgugagcgccgaguuccagcacaagagaacccugaccagcgacaccaagcuggccggcuuccugaaguucuacaacagcguguggaccuucuacggcgagaccccccacgccaccaccgacuacagcagcaccagcaaccugagcgagguggagaccgccauccacguggaguucuacaucauccccagaagccaggagagcaagugcaacgaguacaucaacaccggccugugaggacuagucccuguucccagagcccacuuuuuuuucuuuuuuugaaauaaaauagccugucuuucagaucucaaaggcucuuuucagagccaccaaaaaaaaaaaaaaaaaaaaaaaaaaaaaaaaaaaaaaaaaaaaaaaaaaaaaaaaaaaaaaaaaaaaaaaaaaaaaaaaaaaaaaaaaaaaaaaaaaaaa

SEQ ID NO: 1347 - RNA, 1319 nt, Artificial Sequence
  mRNA product Design a-1 (hSL-A100) comprising derived and/or modified sequence from RVA/BE1128/P[8]__AEX30671.1__LumSynt_P2_VP8*(65-223) (opt4)
aggagagucccgcagucggcguccagcggcucugcuuguucgugugugugucguugcaggccuuauucaagcuuaccaugcagaucuacgagggcaagcugaccgccgagggccugagauucggcaucguggccagcagauucaaccacgcccugguggacagacugguggagggcgccaucgacgccaucgugagacacggcggcagagaggaggacaucacccuggugagagugcccggcagcugggagauccccguggccgccggcgagcuggccagaaaggaggacaucgacgccgugaucgccaucggcgugcugaucagaggcgccaccccccacuucgacuacaucgccagcgaggugagcaagggccuggccgaccugagccuggagcugagaaagcccaucaccuucggcgugaucaccgccgacacccuggagcaggccaucgagagagccggcaccaagcacggcaacaagggcugggaggccgcccugagcgccaucgagauggccaaccuguucaagagccugagaggcggcagcggcggcagcggcggcagcggcggcagcggcggcggccaguacaucaaggccaacagcaaguucaucggcaucaccgagcugggcagcggcagcggccuggacggccccuaccagcccaccaccuucaccccccccaccgacuacuggauccugaucaccagcaacaccaacggcgugguguacgagagcaccaacaacagcgacuucuggaccgccgugaucgccguggagccccacgugaaccccguggacagacaguacaacguguucggcgagaacaagcaguucaacgugagaaacgacagcgacaaguggaaguuccuggagauguucagaggcagcagccagaacgacuucuacaacagaagaacccugaccagcgacaccagacuggugggcauccugaaguacggcggcagaguguggaccuuccacggcgagacccccagagccaccaccgacagcagcaacaccgccaaccuggacggcaucagcaucaccauccacagcgaguucuacaucauccccagaagccaggagagcaagugcaacgaguacaucaacaacggccugugaggacuagucccuguucccagagcccacuuuuuuuucuuuuuuugaaauaaaauagccugucuuucagaucucaaaggcucuuuucagagccaccaaaaaaaaaaaaaaaaaaaaaaaaaaaaaaaaaaaaaaaaaaaaaaaaaaaaaaaaaaaaaaaaaaaaaaaaaaaaaaaaaaaaaaaaaaaaaaaaaaaaa

SEQ ID NO: 1348 - RNA, 1319 nt, Artificial Sequence
  mRNA product Design a-1 (hSL-A100) comprising derived and/or modified sequence from RVA/Wa-VirWa/P[8]__ACR22783.1__LumSynt_P2_VP8*(65-223) (opt4)
aggagagucccgcagucggcguccagcggcucugcuuguucgugugugugucguugcaggccuuauucaagcuuaccaugcagaucuacgagggcaagcugaccgccgagggccugagauucggcaucguggccagcagauucaaccacgcccugguggacagacugguggagggcgccaucgacgccaucgugagacacggcggcagagaggaggacaucacccuggugagagugcccggcagcugggagauccccguggccgccggcgagcuggccagaaaggaggacaucgacgccgugaucgccaucggcgugcugaucagaggcgccaccccccacuucgacuacaucgccagcgaggugagcaagggccuggccgaccugagccuggagcugagaaagcccaucaccuucggcgugaucaccgccgacacccuggagcaggccaucgagagagccggcaccaagcacggcaacaagggcugggaggccgcccugagcgccaucgagauggccaaccuguucaagagccugagaggcggcagcggcggcagcggcggcagcggcggcagcggcggcggccaguacaucaaggccaacagcaaguucaucggcaucaccgagcugggcagcggcagcggccuggacggccccuaccagcccaccaccuucaccccccccaacgacuacuggauccugaucaacagcaacaccaacggcgugguguacgagagcaccaacaacagcgacuucuggaccgccgugguggccaucgagccccacgugaaccccguggacagacaguacaccaucuucggcgagagcaagcaguucaacgugagaaacgacagcaacaaguggaaguuccuggagauguucagaagcagcagccagaacgaguucuacaacagaagaacccugaccagcgacaccagacuggugggcauccugaaguacggcggcagaguguggaccuuccacggcgagacccccagagccaccaccgacagcagcagcaccgccaaccugaacaacaucagcaucaccauccacagcgaguucuacaucauccccagaagccaggagagcaagugcaacgaguacaucaacaacggccugugaggacuagucccuguucccagagcccacuuuuuuuucuuuuuuugaaauaaaauagccugucuuucagaucucaaaggcucuuuucagagccaccaaaaaaaaaaaaaaaaaaaaaaaaaaaaaaaaaaaaaaaaaaaaaaaaaaaaaaaaaaaaaaaaaaaaaaaaaaaaaaaaaaaaaaaaaaaaaaaaaaaaa

SEQ ID NO: 1349 - RNA, 1319 nt, Artificial Sequence
  mRNA product Design a-1 (hSL-A100) comprising derived and/or modified sequence from RVA/Wa/P[8]__AAA47290.1__LumSynt_P2_VP8*(65-223) (opt4)
aggagagucccgcagucggcguccagcggcucugcuuguucgugugugugucguugcaggccuuauucaagcuuaccaugcagaucuacgagggcaagcugaccgccgagggccugagauucggcaucguggccagcagauucaaccacgcccugguggacagacugguggagggcgccaucgacgccaucgugagacacggcggcagagaggaggacaucacccuggugagagugcccggcagcugggagauccccguggccgccggcgagcuggccagaaaggaggacaucgacgccgugaucgccaucggcgugcugaucagaggcgccaccccccacuucgacuacaucgccagcgaggugagcaagggccuggccgaccugagccuggagcugagaaagcccaucaccuucggcgugaucaccgccgacacccuggagcaggccaucgagagagccggcaccaagcacggcaacaagggcugggaggccgcccugagcgccaucgagauggccaaccuguucaagagccugagaggcggcagcggcggcagcggcggcagcggcggcagcggcggcggccaguacaucaaggccaacagcaaguucaucggcaucaccgagcugggcagcggcagcggccuggacggccccuaccagcccaccaccuucaccccccccaacgacuacuggauccugaucaacagcaacaccaacggcgugguguacgagagcaccaacaacagcgacuucuggaccgccgugguggccaucgagccccacgugaaccccguggacagacaguacaccaucuucggcgagagcaagcaguucaacgugagcaacgacagcaacaaguggaaguuccuggagauguucagaagcagcagccagaacgaguucuacaacagaagaacccugaccagcgacaccagauucgugggcauccugaaguacggcggcagaguguggaccuuccacggcgagacccccagagccaccaccgacagcagcagcaccgccaaccugaacaacaucagcaucaccauccacagcgaguucuacaucauccccagaagccaggagagcaagugcaacgaguacaucaacaacggccugugaggacuagucccuguucccagagcccacuuuuuuuucuuuuuuugaaauaaaauagccugucuuucagaucucaaaggcucuuuucagagccaccaaaaaaaaaaaaaaaaaaaaaaaaaaaaaaaaaaaaaaaaaaaaaaaaaaaaaaaaaaaaaaaaaaaaaaaaaaaaaaaaaaaaaaaaaaaaaaaaaaaaa

SEQ ID NO: 1350 - RNA, 1319 nt, Artificial Sequence; identical to SEQ ID NO: 1349
  mRNA product Design a-1 (hSL-A100) comprising derived and/or modified sequence from RVA/Wa/P[8]__AAA66953.1__LumSynt_P2_VP8*(65-223) (opt4)

SEQ ID NO: 1351 - RNA, 1391 nt, Artificial Sequence
  mRNA product Design a-1 (hSL-A100) comprising derived and/or modified sequence from RVA/BE1058/P[4]__AEX30665.1__LumSynt_P2_VP8*(41-223) (opt4)
aggagagucccgcagucggcguccagcggcucugcuuguucgugugugugucguugcaggccuuauucaagcuuaccaugcagaucuacgagggcaagcugaccgccgagggccugagauucggcaucguggccagcagauucaaccacgcccugguggacagacugguggagggcgccaucgacgccaucgugagacacggcggcagagaggaggacaucacccuggugagagugcccggcagcugggagauccccguggccgccggcgagcuggccagaaaggaggacaucgacgccgugaucgccaucggcgugcugaucagaggcgccaccccccacuucgacuacaucgccagcgaggugagcaagggccuggccgaccugagccuggagcugagaaagcccaucaccuucggcgugaucaccgccgacacccuggagcaggccaucgagagagccggcaccaagcacggcaacaagggcugggaggccgcccugagcgccaucgagauggccaaccuguucaagagccugagaggcggcagcggcggcagcggcggcagcggcggcagcggcggcggccaguacaucaaggccaacagcaaguucaucggcaucaccgagcugggcagcggcagcggcgcccagaccagauacgcccccgugaacuggggccacggcgagaucaacgacagcaccaccguggagcccgugcuggacggccccuaccagcccaccaccuucaagccccccaacgacuacuggcugcugaucagcagcaacaccgacggcgugguguacgagagcaccaacaacagcgacuucuggaccgccgugaucgccguggagccccacgugaaccagaccaacagacaguacgugcuguucggcgagaacaagcaguucaacaucgagaacagcagcgacaaguggaaguucuucgagauguucaagggcaacagccagagcgacuucagcaacagaagaacccugaccagcagcaacagacuggugggcaugcugaaguacggcggcagaguguggaccuuccacggcgagacccccagagccaccaccgacagcagcagcaccgccgaccugaacaacaucagcaucaucauccacagcgaguucuacaucauccccagaagccaggagagcaagugcaacgaguacaucaacaacggccugugaggacuagucccuguucccagagcccacuuuuuuuucuuuuuuugaaauaaaauagccugucuuucagaucucaaaggcucuuuucagagccaccaaaaaaaaaaaaaaaaaaaaaaaaaaaaaaaaaaaaaaaaaaaaaaaaaaaaaaaaaaaaaaaaaaaaaaaaaaaaaaaaaaaaaaaaaaaaaaaaaaaaa

SEQ ID NO: 1352 - RNA, 1391 nt, Artificial Sequence
  mRNA product Design a-1 (hSL-A100) comprising derived and/or modified sequence from RVA/DS-1/P[4]__CAD62680.1__LumSynt_P2_VP8*(41-223) (opt4)
aggagagucccgcagucggcguccagcggcucugcuuguucgugugugugucguugcaggccuuauucaagcuuaccaugcagaucuacgagggcaagcugaccgccgagggccugagauucggcaucguggccagcagauucaaccacgcccugguggacagacugguggagggcgccaucgacgccaucgugagacacggcggcagagaggaggacaucacccuggugagagugcccggcagcugggagauccccguggccgccggcgagcuggccagaaaggaggacaucgacgccgugaucgccaucggcgugcugaucagaggcgccaccccccacuucgacuacaucgccagcgaggugagcaagggccuggccgaccugagccuggagcugagaaagcccaucaccuucggcgugaucaccgccgacacccuggagcaggccaucgagagagccggcaccaagcacggcaacaagggcugggaggccgcccugagcgccaucgagauggccaaccuguucaagagccugagaggcggcagcggcggcagcggcggcagcggcggcagcggcggcggccaguacaucaaggccaacagcaaguucaucggcaucaccgagcugggcagcggcagcggcgcccagaccagauacgcccccgugaacuggggcagcugggagaucaacgacagcaccaccguggagcccgugcuggacggccccuaccagcccaccaccuucaagccccccaacgacuacuggcugcugaucagcagcaacaccaacggcgugguguacgagagcaccaacaacaacgacuucuggaccgccgugagcagcguggagccccacgugagccagaccaacagacaguacauccuguucggcgagaacaagcaguucaacguggagaacaacagcgacaaguggaaguucuucgagaccuucaccggcagcagccagggcaacuucagcaacagaagaacccugaccagcagcaacagacuggugggcaugcugaaguacggcggcagaguguggaccuuccacggcgagacccccagagccaccaccgacagcagcaacaccgccgaccugaacaacaucagcaucaucauccacagcgaguucuacaucauccccagaagccaggagagcaagugcaacgaguacaucaacaacggccugugaggacuagucccuguucccagagcccacuuuuuuuucuuuuuuugaaauaaaauagccugucuuucagaucucaaaggcucuuuucagagccaccaaaaaaaaaaaaaaaaaaaaaaaaaaaaaaaaaaaaaaaaaaaaaaaaaaaaaaaaaaaaaaaaaaaaaaaaaaaaaaaaaaaaaaaaaaaaaaaaaaaaa

SEQ ID NO: 1353 - RNA, 1391 nt, Artificial Sequence; identical to SEQ ID NO: 1352
  mRNA product Design a-1 (hSL-A100) comprising derived and/or modified sequence from RVA/DS-1/P[4]__ABV53252.1__LumSynt_P2_VP8*(41-223) (opt4)

SEQ ID NO: 1354 - RNA, 1391 nt, Artificial Sequence
  mRNA product Design a-1 (hSL-A100) comprising derived and/or modified sequence from RVA/F01322/P[6]__AFA51886.1__LumSynt_P2_VP8*(41-223) (opt4)
aggagagucccgcagucggcguccagcggcucugcuuguucgugugugugucguugcaggccuuauucaagcuuaccaugcagaucuacgagggcaagcugaccgccgagggccugagauucggcaucguggccagcagauucaaccacgcccugguggacagacugguggagggcgccaucgacgccaucgugagacacggcggcagagaggaggacaucacccuggugagagugcccggcagcugggagauccccguggccgccggcgagcuggccagaaaggaggacaucgacgccgugaucgccaucggcgugcugaucagaggcgccaccccccacuucgacuacaucgccagcgaggugagcaagggccuggccgaccugagccuggagcugagaaagcccaucaccuucggcgugaucaccgccgacacccuggagcaggccaucgagagagccggcaccaagcacggcaacaagggcugggaggccgcccugagcgccaucgagauggccaaccuguucaagagccugagaggcggcagcggcggcagcggcggcagcggcggcagcggcggcggccaguacaucaaggccaacagcaaguucaucggcaucaccgagcugggcagcggcagcggcgcccagaccaacuacgcccccgugaccuggagccacggcgaggugaacgacagcaccaccaucgagcccgugcuggacggccccuaccagcccaccaacuucaagccccccaacgacuacuggauccugcugaaccccaccaaccagcagguggugcuggagggcaccaacaagaccgacaucuggguggcccugcugcugguggagcccaacgugaccaaccagagcagacaguacacccuguucggcgagaccaagcagaucaccguggagaacaacaccaacaaguggaaguucuucgagauguucagaagcagcgugagcgccgaguuccagcacaagagaacccugaccagcgacaccaagcuggccggcuucaugaaguucuacaacagcguguggaccuuccacggcgagacccccaacgccaccaccgacuacagcagcaccagcaaccuguucgagguggagaccgugauccacguggaguucuacaucauccccagaagccaggagagcaagugcagcgaguacaucaacaccggccugugaggacuagucccuguucccagagcccacuuuuuuuucuuuuuuugaaauaaaauagccugucuuucagaucucaaaggcucuuuucagagccaccaaaaaaaaaaaaaaaaaaaaaaaaaaaaaaaaaaaaaaaaaaaaaaaaaaaaaaaaaaaaaaaaaaaaaaaaaaaaaaaaaaaaaaaaaaaaaaaaaaaaa

SEQ ID NO: 1355 - RNA, 1391 nt, Artificial Sequence
  mRNA product Design a-1 (hSL-A100) comprising derived and/or modified sequence from RVA/1076/P[6]__AAA47337.1__LumSynt_P2_VP8*(41-223) (opt4)
aggagagucccgcagucggcguccagcggcucugcuuguucgugugugugucguugcaggccuuauucaagcuuaccaugcagaucuacgagggcaagcugaccgccgagggccugagauucggcaucguggccagcagauucaaccacgcccugguggacagacugguggagggcgccaucgacgccaucgugagacacggcggcagagaggaggacaucacccuggugagagugcccggcagcugggagauccccguggccgccggcgagcuggccagaaaggaggacaucgacgccgugaucgccaucggcgugcugaucagaggcgccaccccccacuucgacuacaucgccagcgaggugagcaagggccuggccgaccugagccuggagcugagaaagcccaucaccuucggcgugaucaccgccgacacccuggagcaggccaucgagagagccggcaccaagcacggcaacaagggcugggaggccgcccugagcgccaucgagauggccaaccuguucaagagccugagaggcggcagcggcggcagcggcggcagcggcggcagcggcggcggccaguacaucaaggccaacagcaaguucaucggcaucaccgagcugggcagcggcagcggcgcccagaccaacuacgcccccgugaccuggagccacggcgaggugaacgacagcaccaccaucgagcccgugcuggacggccccuaccagcccaccagcuucaagccccccagcgacuacuggauccugcugaaccccaccaaccagcagguggugcuggagggcaccaacaagaccgacaucuggguggcccugcugcugguggagcccaacgugaccaaccagagcagacaguacacccuguucggcgagaccaagcagaucaccguggagaacaacaccaacaaguggaaguucuucgagauguucagaagcagcgugagcgccgaguuccagcacaagagaacccugaccagcgacaccaagcuggccggcuuccugaaguucuacaacagcguguggaccuucuacggcgagaccccccacgccaccaccgacuacagcagcaccagcaaccugagcgagguggagaccgccauccacguggaguucuacaucauccccagaagccaggagagcaagugcaacgaguacaucaacaccggccugugaggacuagucccuguucccagagcccacuuuuuuuucuuuuuuugaaauaaaauagccugucuuucagaucucaaaggcucuuuucagagccaccaaaaaaaaaaaaaaaaaaaaaaaaaaaaaaaaaaaaaaaaaaaaaaaaaaaaaaaaaaaaaaaaaaaaaaaaaaaaaaaaaaaaaaaaaaaaaaaaaaaaa

SEQ ID NO: 1356 - RNA, 1391 nt, Artificial Sequence
  mRNA product Design a-1 (hSL-A100) comprising derived and/or modified sequence from RVA/BE1128/P[8]__AEX30671.1__LumSynt_P2_VP8*(41-223) (opt4)
aggagagucccgcagucggcguccagcggcucugcuuguucgugugugugucguugcaggccuuauucaagcuuaccaugcagaucuacgagggcaagcugaccgccgagggccugagauucggcaucguggccagcagauucaaccacgcccugguggacagacugguggagggcgccaucgacgccaucgugagacacggcggcagagaggaggacaucacccuggugagagugcccggcagcugggagauccccguggccgccggcgagcuggccagaaaggaggacaucgacgccgugaucgccaucggcgugcugaucagaggcgccaccccccacuucgacuacaucgccagcgaggugagcaagggccuggccgaccugagccuggagcugagaaagcccaucaccuucggcgugaucaccgccgacacccuggagcaggccaucgagagagccggcaccaagcacggcaacaagggcugggaggccgcccugagcgccaucgagauggccaaccuguucaagagccugagaggcggcagcggcggcagcggcggcagcggcggcagcggcggcggccaguacaucaaggccaacagcaaguucaucggcaucaccgagcugggcagcggcagcggcgcccagaccagauacgcccccgugaacuggggccacggcgagaucaacgacagcaccaccguggagcccauccuggacggccccuaccagcccaccaccuucaccccccccaccgacuacuggauccugaucaccagcaacaccaacggcgugguguacgagagcaccaacaacagcgacuucuggaccgccgugaucgccguggagccccacgugaaccccguggacagacaguacaacguguucggcgagaacaagcaguucaacgugagaaacgacagcgacaaguggaaguuccuggagauguucagaggcagcagccagaacgacuucuacaacagaagaacccugaccagcgacaccagacuggugggcauccugaaguacggcggcagaguguggaccuuccacggcgagacccccagagccaccaccgacagcagcaacaccgccaaccuggacggcaucagcaucaccauccacagcgaguucuacaucauccccagaagccaggagagcaagugcaacgaguacaucaacaacggccugugaggacuagucccuguucccagagcccacuuuuuuuucuuuuuuugaaauaaaauagccugucuuucagaucucaaaggcucuuuucagagccaccaaaaaaaaaaaaaaaaaaaaaaaaaaaaaaaaaaaaaaaaaaaaaaaaaaaaaaaaaaaaaaaaaaaaaaaaaaaaaaaaaaaaaaaaaaaaaaaaaaaaa

SEQ ID NO: 1357 - RNA, 1391 nt, Artificial Sequence
  mRNA product Design a-1 (hSL-A100) comprising derived and/or modified sequence from RVA/Wa-VirWa/P[8]__ACR22783.1__LumSynt_P2_VP8*(41-223) (opt4)
aggagagucccgcagucggcguccagcggcucugcuuguucgugugugugucguugcaggccuuauucaagcuuaccaugcagaucuacgagggcaagcugaccgccgagggccugagauucggcaucguggccagcagauucaaccacgcccugguggacagacugguggagggcgccaucgacgccaucgugagacacggcggcagagaggaggacaucacccuggugagagugcccggcagcugggagauccccguggccgccggcgagcuggccagaaaggaggacaucgacgccgugaucgccaucggcgugcugaucagaggcgccaccccccacuucgacuacaucgccagcgaggugagcaagggccuggccgaccugagccuggagcugagaaagcccaucaccuucggcgugaucaccgccgacacccuggagcaggccaucgagagagccggcaccaagcacggcaacaagggcugggaggccgcccugagcgccaucgagauggccaaccuguucaagagccugagaggcggcagcggcggcagcggcggcagcggcggcagcggcggcggccaguacaucaaggccaacagcaaguucaucggcaucaccgagcugggcagcggcagcggcgcccagaccagauacgcccccgugaacuggggccacggcgagaucaacgacagcaccaccguggagcccauccuggacggccccuaccagcccaccaccuucaccccccccaacgacuacuggauccugaucaacagcaacaccaacggcgugguguacgagagcaccaacaacagcgacuucuggaccgccgugguggccaucgagccccacgugaaccccguggacagacaguacaccaucuucggcgagagcaagcaguucaacgugagaaacgacagcaacaaguggaaguuccuggagauguucagaagcagcagccagaacgaguucuacaacagaagaacccugaccagcgacaccagacuggugggcauccugaaguacggcggcagaguguggaccuuccacggcgagacccccagagccaccaccgacagcagcagcaccgccaaccugaacaacaucagcaucaccauccacagcgaguucuacaucauccccagaagccaggagagcaagugcaacgaguacaucaacaacggccugugaggacuagucccuguucccagagcccacuuuuuuuucuuuuuuugaaauaaaauagccugucuuucagaucucaaaggcucuuuucagagccaccaaaaaaaaaaaaaaaaaaaaaaaaaaaaaaaaaaaaaaaaaaaaaaaaaaaaaaaaaaaaaaaaaaaaaaaaaaaaaaaaaaaaaaaaaaaaaaaaaaaaa

SEQ ID NO: 1358 - RNA, 1391 nt, Artificial Sequence
  mRNA product Design a-1 (hSL-A100) comprising derived and/or modified sequence from RVA/Wa/P[8]__AAA47290.1__LumSynt_P2_VP8*(41-223) (opt4)
aggagagucccgcagucggcguccagcggcucugcuuguucgugugugugucguugcaggccuuauucaagcuuaccaugcagaucuacgagggcaagcugaccgccgagggccugagauucggcaucguggccagcagauucaaccacgcccugguggacagacugguggagggcgccaucgacgccaucgugagacacggcggcagagaggaggacaucacccuggugagagugcccggcagcugggagauccccguggccgccggcgagcuggccagaaaggaggacaucgacgccgugaucgccaucggcgugcugaucagaggcgccaccccccacuucgacuacaucgccagcgaggugagcaagggccuggccgaccugagccuggagcugagaaagcccaucaccuucggcgugaucaccgccgacacccuggagcaggccaucgagagagccggcaccaagcacggcaacaagggcugggaggccgcccugagcgccaucgagauggccaaccuguucaagagccugagaggcggcagcggcggcagcggcggcagcggcggcagcggcggcggccaguacaucaaggccaacagcaaguucaucggcaucaccgagcugggcagcggcagcggcgcccagaccagauacgcccccgugaacuggggccacggcgagaucaacgacagcaccaccguggagcccauccuggacggccccuaccagcccaccaccuucaccccccccaacgacuacuggauccugaucaacagcaacaccaacggcgugguguacgagagcaccaacaacagcgacuucuggaccgccgugguggccaucgagccccacgugaaccccguggacagacaguacaccaucuucggcgagagcaagcaguucaacgugagcaacgacagcaacaaguggaaguuccuggagauguucagaagcagcagccagaacgaguucuacaacagaagaacccugaccagcgacaccagauucgugggcauccugaaguacggcggcagaguguggaccuuccacggcgagacccccagagccaccaccgacagcagcagcaccgccaaccugaacaacaucagcaucaccauccacagcgaguucuacaucauccccagaagccaggagagcaagugcaacgaguacaucaacaacggccugugaggacuagucccuguucccagagcccacuuuuuuuucuuuuuuugaaauaaaauagccugucuuucagaucucaaaggcucuuuucagagccaccaaaaaaaaaaaaaaaaaaaaaaaaaaaaaaaaaaaaaaaaaaaaaaaaaaaaaaaaaaaaaaaaaaaaaaaaaaaaaaaaaaaaaaaaaaaaaaaaaaaaa

SEQ ID NO: 1359 - RNA, 1391 nt, Artificial Sequence
  mRNA product Design a-1 (hSL-A100) comprising derived and/or modified sequence from RVA/Wa/P[8]__AAA66953.1__LumSynt_P2_VP8*(41-223) (opt4)
aggagagucccgcagucggcguccagcggcucugcuuguucgugugugugucguugcaggccuuauucaagcuuaccaugcagaucuacgagggcaagcugaccgccgagggccugagauucggcaucguggccagcagauucaaccacgcccugguggacagacugguggagggcgccaucgacgccaucgugagacacggcggcagagaggaggacaucacccuggugagagugcccggcagcugggagauccccguggccgccggcgagcuggccagaaaggaggacaucgacgccgugaucgccaucggcgugcugaucagaggcgccaccccccacuucgacuacaucgccagcgaggugagcaagggccuggccgaccugagccuggagcugagaaagcccaucaccuucggcgugaucaccgccgacacccuggagcaggccaucgagagagccggcaccaagcacggcaacaagggcugggaggccgcccugagcgccaucgagauggccaaccuguucaagagccugagaggcggcagcggcggcagcggcggcagcggcggcagcggcggcggccaguacaucaaggccaacagcaaguucaucggcaucaccgagcugggcagcggcagcggcgcccagaccagauacgcccccgugaacuggggccacggcgagaucaacgacagcaccaccguggagcccaugcuggacggccccuaccagcccaccaccuucaccccccccaacgacuacuggauccugaucaacagcaacaccaacggcgugguguacgagagcaccaacaacagcgacuucuggaccgccgugguggccaucgagccccacgugaaccccguggacagacaguacaccaucuucggcgagagcaagcaguucaacgugagcaacgacagcaacaaguggaaguuccuggagauguucagaagcagcagccagaacgaguucuacaacagaagaacccugaccagcgacaccagauucgugggcauccugaaguacggcggcagaguguggaccuuccacggcgagacccccagagccaccaccgacagcagcagcaccgccaaccugaacaacaucagcaucaccauccacagcgaguucuacaucauccccagaagccaggagagcaagugcaacgaguacaucaacaacggccugugaggacuagucccuguucccagagcccacuuuuuuuucuuuuuuugaaauaaaauagccugucuuucagaucucaaaggcucuuuucagagccaccaaaaaaaaaaaaaaaaaaaaaaaaaaaaaaaaaaaaaaaaaaaaaaaaaaaaaaaaaaaaaaaaaaaaaaaaaaaaaaaaaaaaaaaaaaaaaaaaaaaaa

SEQ ID NO: 1360 - RNA, 866 nt, Artificial Sequence
  mRNA product Design a-1 (hSL-A100) comprising derived and/or modified sequence from RVA/BE1058/P[4]__AEX30665.1__SP-IgE_P2_VP8*(65-223) (opt4)
aggagagucccgcagucggcguccagcggcucugcuuguucgugugugugucguugcaggccuuauucaagcuuaccauggacuggaccuggauccuguuccugguggccgccgccaccagagugcacagccaguacaucaaggccaacagcaaguucaucggcaucaccgagcugggcagcggcagcggccuggacggccccuaccagcccaccaccuucaagccccccaacgacuacuggcugcugaucagcagcaacaccgacggcgugguguacgagagcaccaacaacagcgacuucuggaccgccgugaucgccguggagccccacgugaaccagaccaacagacaguacgugcuguucggcgagaacaagcaguucaacaucgagaacagcagcgacaaguggaaguucuucgagauguucaagggcaacagccagagcgacuucagcaacagaagaacccugaccagcagcaacagacuggugggcaugcugaaguacggcggcagaguguggaccuuccacggcgagacccccagagccaccaccgacagcagcagcaccgccgaccugaacaacaucagcaucaucauccacagcgaguucuacaucauccccagaagccaggagagcaagugcaacgaguacaucaacaacggccugugaggacuagucccuguucccagagcccacuuuuuuuucuuuuuuugaaauaaaauagccugucuuucagaucucaaaggcucuuuucagagccaccaaaaaaaaaaaaaaaaaaaaaaaaaaaaaaaaaaaaaaaaaaaaaaaaaaaaaaaaaaaaaaaaaaaaaaaaaaaaaaaaaaaaaaaaaaaaaaaaaaaaa

SEQ ID NO: 1361 - RNA, 866 nt, Artificial Sequence
  mRNA product Design a-1 (hSL-A100) comprising derived and/or modified sequence from RVA/DS-1/P[4]__CAD62680.1__SP-IgE_P2_VP8*(65-223) (opt4)
aggagagucccgcagucggcguccagcggcucugcuuguucgugugugugucguugcaggccuuauucaagcuuaccauggacuggaccuggauccuguuccugguggccgccgccaccagagugcacagccaguacaucaaggccaacagcaaguucaucggcaucaccgagcugggcagcggcagcggccuggacggccccuaccagcccaccaccuucaagccccccaacgacuacuggcugcugaucagcagcaacaccaacggcgugguguacgagagcaccaacaacaacgacuucuggaccgccgugagcagcguggagccccacgugagccagaccaacagacaguacauccuguucggcgagaacaagcaguucaacguggagaacaacagcgacaaguggaaguucuucgagaccuucaccggcagcagccagggcaacuucagcaacagaagaacccugaccagcagcaacagacuggugggcaugcugaaguacggcggcagaguguggaccuuccacggcgagacccccagagccaccaccgacagcagcaacaccgccgaccugaacaacaucagcaucaucauccacagcgaguucuacaucauccccagaagccaggagagcaagugcaacgaguacaucaacaacggccugugaggacuagucccuguucccagagcccacuuuuuuuucuuuuuuugaaauaaaauagccugucuuucagaucucaaaggcucuuuucagagccaccaaaaaaaaaaaaaaaaaaaaaaaaaaaaaaaaaaaaaaaaaaaaaaaaaaaaaaaaaaaaaaaaaaaaaaaaaaaaaaaaaaaaaaaaaaaaaaaaaaaaa

SEQ ID NO: 1362 - RNA, 866 nt, Artificial Sequence; identical to SEQ ID NO: 1361
  mRNA product Design a-1 (hSL-A100) comprising derived and/or modified sequence from RVA/DS-1/P[4]__ABV53252.1__SP-IgE_P2_VP8*(65-223) (opt4)

SEQ ID NO: 1363 - RNA, 866 nt, Artificial Sequence
  mRNA product Design a-1 (hSL-A100) comprising derived and/or modified sequence from RVA/F01322/P[6]__AFA51886.1__SP-IgE_P2_VP8*(65-223) (opt4)
aggagagucccgcagucggcguccagcggcucugcuuguucgugugugugucguugcaggccuuauucaagcuuaccauggacuggaccuggauccuguuccugguggccgccgccaccagagugcacagccaguacaucaaggccaacagcaaguucaucggcaucaccgagcugggcagcggcagcggccuggacggccccuaccagcccaccaacuucaagccccccaacgacuacuggauccugcugaaccccaccaaccagcagguggugcuggagggcaccaacaagaccgacaucuggguggcccugcugcugguggagcccaacgugaccaaccagagcagacaguacacccuguucggcgagaccaagcagaucaccguggagaacaacaccaacaaguggaaguucuucgagauguucagaagcagcgugagcgccgaguuccagcacaagagaacccugaccagcgacaccaagcuggccggcuucaugaaguucuacaacagcguguggaccuuccacggcgagacccccaacgccaccaccgacuacagcagcaccagcaaccuguucgagguggagaccgugauccacguggaguucuacaucauccccagaagccaggagagcaagugcagcgaguacaucaacaccggccugugaggacuagucccuguucccagagcccacuuuuuuuucuuuuuuugaaauaaaauagccugucuuucagaucucaaaggcucuuuucagagccaccaaaaaaaaaaaaaaaaaaaaaaaaaaaaaaaaaaaaaaaaaaaaaaaaaaaaaaaaaaaaaaaaaaaaaaaaaaaaaaaaaaaaaaaaaaaaaaaaaaaaa

SEQ ID NO: 1364 - RNA, 866 nt, Artificial Sequence
  mRNA product Design a-1 (hSL-A100) comprising derived and/or modified sequence from RVA/1076/P[6]__AAA47337.1__SP-IgE_P2_VP8*(65-223) (opt4)
aggagagucccgcagucggcguccagcggcucugcuuguucgugugugugucguugcaggccuuauucaagcuuaccauggacuggaccuggauccuguuccugguggccgccgccaccagagugcacagccaguacaucaaggccaacagcaaguucaucggcaucaccgagcugggcagcggcagcggccuggacggccccuaccagcccaccagcuucaagccccccagcgacuacuggauccugcugaaccccaccaaccagcagguggugcuggagggcaccaacaagaccgacaucuggguggcccugcugcugguggagcccaacgugaccaaccagagcagacaguacacccuguucggcgagaccaagcagaucaccguggagaacaacaccaacaaguggaaguucuucgagauguucagaagcagcgugagcgccgaguuccagcacaagagaacccugaccagcgacaccaagcuggccggcuuccugaaguucuacaacagcguguggaccuucuacggcgagaccccccacgccaccaccgacuacagcagcaccagcaaccugagcgagguggagaccgccauccacguggaguucuacaucauccccagaagccaggagagcaagugcaacgaguacaucaacaccggccugugaggacuagucccuguucccagagcccacuuuuuuuucuuuuuuugaaauaaaauagccugucuuucagaucucaaaggcucuuuucagagccaccaaaaaaaaaaaaaaaaaaaaaaaaaaaaaaaaaaaaaaaaaaaaaaaaaaaaaaaaaaaaaaaaaaaaaaaaaaaaaaaaaaaaaaaaaaaaaaaaaaaaa

SEQ ID NO: 1365 - RNA, 866 nt, Artificial Sequence
  mRNA product Design a-1 (hSL-A100) comprising derived and/or modified sequence from RVA/BE1128/P[8]__AEX30671.1__SP-IgE_P2_VP8*(65-223) (opt4)
aggagagucccgcagucggcguccagcggcucugcuuguucgugugugugucguugcaggccuuauucaagcuuaccauggacuggaccuggauccuguuccugguggccgccgccaccagagugcacagccaguacaucaaggccaacagcaaguucaucggcaucaccgagcugggcagcggcagcggccuggacggccccuaccagcccaccaccuucaccccccccaccgacuacuggauccugaucaccagcaacaccaacggcgugguguacgagagcaccaacaacagcgacuucuggaccgccgugaucgccguggagccccacgugaaccccguggacagacaguacaacguguucggcgagaacaagcaguucaacgugagaaacgacagcgacaaguggaaguuccuggagauguucagaggcagcagccagaacgacuucuacaacagaagaacccugaccagcgacaccagacuggugggcauccugaaguacggcggcagaguguggaccuuccacggcgagacccccagagccaccaccgacagcagcaacaccgccaaccuggacggcaucagcaucaccauccacagcgaguucuacaucauccccagaagccaggagagcaagugcaacgaguacaucaacaacggccugugaggacuagucccuguucccagagcccacuuuuuuuucuuuuuuugaaauaaaauagccugucuuucagaucucaaaggcucuuuucagagccaccaaaaaaaaaaaaaaaaaaaaaaaaaaaaaaaaaaaaaaaaaaaaaaaaaaaaaaaaaaaaaaaaaaaaaaaaaaaaaaaaaaaaaaaaaaaaaaaaaaaaa

SEQ ID NO: 1366 - RNA, 866 nt, Artificial Sequence
  mRNA product Design a-1 (hSL-A100) comprising derived and/or modified sequence from RVA/Wa-VirWa/P[8]__ACR22783.1__SP-IgE_P2_VP8*(65-223) (opt4)
aggagagucccgcagucggcguccagcggcucugcuuguucgugugugugucguugcaggccuuauucaagcuuaccauggacuggaccuggauccuguuccugguggccgccgccaccagagugcacagccaguacaucaaggccaacagcaaguucaucggcaucaccgagcugggcagcggcagcggccuggacggccccuaccagcccaccaccuucaccccccccaacgacuacuggauccugaucaacagcaacaccaacggcgugguguacgagagcaccaacaacagcgacuucuggaccgccgugguggccaucgagccccacgugaaccccguggacagacaguacaccaucuucggcgagagcaagcaguucaacgugagaaacgacagcaacaaguggaaguuccuggagauguucagaagcagcagccagaacgaguucuacaacagaagaacccugaccagcgacaccagacuggugggcauccugaaguacggcggcagaguguggaccuuccacggcgagacccccagagccaccaccgacagcagcagcaccgccaaccugaacaacaucagcaucaccauccacagcgaguucuacaucauccccagaagccaggagagcaagugcaacgaguacaucaacaacggccugugaggacuagucccuguucccagagcccacuuuuuuuucuuuuuuugaaauaaaauagccugucuuucagaucucaaaggcucuuuucagagccaccaaaaaaaaaaaaaaaaaaaaaaaaaaaaaaaaaaaaaaaaaaaaaaaaaaaaaaaaaaaaaaaaaaaaaaaaaaaaaaaaaaaaaaaaaaaaaaaaaaaaa

SEQ ID NO: 1367 - RNA, 866 nt, Artificial Sequence
  mRNA product Design a-1 (hSL-A100) comprising derived and/or modified sequence from RVA/Wa/P[8]__AAA47290.1__SP-IgE_P2_VP8*(65-223) (opt4)
aggagagucccgcagucggcguccagcggcucugcuuguucgugugugugucguugcaggccuuauucaagcuuaccauggacuggaccuggauccuguuccugguggccgccgccaccagagugcacagccaguacaucaaggccaacagcaaguucaucggcaucaccgagcugggcagcggcagcggccuggacggccccuaccagcccaccaccuucaccccccccaacgacuacuggauccugaucaacagcaacaccaacggcgugguguacgagagcaccaacaacagcgacuucuggaccgccgugguggccaucgagccccacgugaaccccguggacagacaguacaccaucuucggcgagagcaagcaguucaacgugagcaacgacagcaacaaguggaaguuccuggagauguucagaagcagcagccagaacgaguucuacaacagaagaacccugaccagcgacaccagauucgugggcauccugaaguacggcggcagaguguggaccuuccacggcgagacccccagagccaccaccgacagcagcagcaccgccaaccugaacaacaucagcaucaccauccacagcgaguucuacaucauccccagaagccaggagagcaagugcaacgaguacaucaacaacggccugugaggacuagucccuguucccagagcccacuuuuuuuucuuuuuuugaaauaaaauagccugucuuucagaucucaaaggcucuuuucagagccaccaaaaaaaaaaaaaaaaaaaaaaaaaaaaaaaaaaaaaaaaaaaaaaaaaaaaaaaaaaaaaaaaaaaaaaaaaaaaaaaaaaaaaaaaaaaaaaaaaaaaa

SEQ ID NO: 1368 - RNA, 866 nt, Artificial Sequence; identical to SEQ ID NO: 1367
  mRNA product Design a-1 (hSL-A100) comprising derived and/or modified sequence from RVA/Wa/P[8]__AAA66953.1__SP-IgE_P2_VP8*(65-223) (opt4)

SEQ ID NO: 1369 - RNA, 938 nt, Artificial Sequence
  mRNA product Design a-1 (hSL-A100) comprising derived and/or modified sequence from RVA/BE1058/P[4]__AEX30665.1__SP-IgE_P2_VP8*(41-223) (opt4)
aggagagucccgcagucggcguccagcggcucugcuuguucgugugugugucguugcaggccuuauucaagcuuaccauggacuggaccuggauccuguuccugguggccgccgccaccagagugcacagccaguacaucaaggccaacagcaaguucaucggcaucaccgagcugggcagcggcagcggcgcccagaccagauacgcccccgugaacuggggccacggcgagaucaacgacagcaccaccguggagcccgugcuggacggccccuaccagcccaccaccuucaagccccccaacgacuacuggcugcugaucagcagcaacaccgacggcgugguguacgagagcaccaacaacagcgacuucuggaccgccgugaucgccguggagccccacgugaaccagaccaacagacaguacgugcuguucggcgagaacaagcaguucaacaucgagaacagcagcgacaaguggaaguucuucgagauguucaagggcaacagccagagcgacuucagcaacagaagaacccugaccagcagcaacagacuggugggcaugcugaaguacggcggcagaguguggaccuuccacggcgagacccccagagccaccaccgacagcagcagcaccgccgaccugaacaacaucagcaucaucauccacagcgaguucuacaucauccccagaagccaggagagcaagugcaacgaguacaucaacaacggccugugaggacuagucccuguucccagagcccacuuuuuuuucuuuuuuugaaauaaaauagccugucuuucagaucucaaaggcucuuuucagagccaccaaaaaaaaaaaaaaaaaaaaaaaaaaaaaaaaaaaaaaaaaaaaaaaaaaaaaaaaaaaaaaaaaaaaaaaaaaaaaaaaaaaaaaaaaaaaaaaaaaaaa

SEQ ID NO: 1370 - RNA, 938 nt, Artificial Sequence
  mRNA product Design a-1 (hSL-A100) comprising derived and/or modified sequence from RVA/DS-1/P[4]__CAD62680.1__SP-IgE_P2_VP8*(41-223) (opt4)
aggagagucccgcagucggcguccagcggcucugcuuguucgugugugugucguugcaggccuuauucaagcuuaccauggacuggaccuggauccuguuccugguggccgccgccaccagagugcacagccaguacaucaaggccaacagcaaguucaucggcaucaccgagcugggcagcggcagcggcgcccagaccagauacgcccccgugaacuggggcagcugggagaucaacgacagcaccaccguggagcccgugcuggacggccccuaccagcccaccaccuucaagccccccaacgacuacuggcugcugaucagcagcaacaccaacggcgugguguacgagagcaccaacaacaacgacuucuggaccgccgugagcagcguggagccccacgugagccagaccaacagacaguacauccuguucggcgagaacaagcaguucaacguggagaacaacagcgacaaguggaaguucuucgagaccuucaccggcagcagccagggcaacuucagcaacagaagaacccugaccagcagcaacagacuggugggcaugcugaaguacggcggcagaguguggaccuuccacggcgagacccccagagccaccaccgacagcagcaacaccgccgaccugaacaacaucagcaucaucauccacagcgaguucuacaucauccccagaagccaggagagcaagugcaacgaguacaucaacaacggccugugaggacuagucccuguucccagagcccacuuuuuuuucuuuuuuugaaauaaaauagccugucuuucagaucucaaaggcucuuuucagagccaccaaaaaaaaaaaaaaaaaaaaaaaaaaaaaaaaaaaaaaaaaaaaaaaaaaaaaaaaaaaaaaaaaaaaaaaaaaaaaaaaaaaaaaaaaaaaaaaaaaaaa

SEQ ID NO: 1371 - RNA, 938 nt, Artificial Sequence; identical to SEQ ID NO: 1370
  mRNA product Design a-1 (hSL-A100) comprising derived and/or modified sequence from RVA/DS-1/P[4]__ABV53252.1__SP-IgE_P2_VP8*(41-223) (opt4)

SEQ ID NO: 1372 - RNA, 938 nt, Artificial Sequence
  mRNA product Design a-1 (hSL-A100) comprising derived and/or modified sequence from RVA/F01322/P[6]__AFA51886.1__SP-IgE_P2_VP8*(41-223) (opt4)
aggagagucccgcagucggcguccagcggcucugcuuguucgugugugugucguugcaggccuuauucaagcuuaccauggacuggaccuggauccuguuccugguggccgccgccaccagagugcacagccaguacaucaaggccaacagcaaguucaucggcaucaccgagcugggcagcggcagcggcgcccagaccaacuacgcccccgugaccuggagccacggcgaggugaacgacagcaccaccaucgagcccgugcuggacggccccuaccagcccaccaacuucaagccccccaacgacuacuggauccugcugaaccccaccaaccagcagguggugcuggagggcaccaacaagaccgacaucuggguggcccugcugcugguggagcccaacgugaccaaccagagcagacaguacacccuguucggcgagaccaagcagaucaccguggagaacaacaccaacaaguggaaguucuucgagauguucagaagcagcgugagcgccgaguuccagcacaagagaacccugaccagcgacaccaagcuggccggcuucaugaaguucuacaacagcguguggaccuuccacggcgagacccccaacgccaccaccgacuacagcagcaccagcaaccuguucgagguggagaccgugauccacguggaguucuacaucauccccagaagccaggagagcaagugcagcgaguacaucaacaccggccugugaggacuagucccuguucccagagcccacuuuuuuuucuuuuuuugaaauaaaauagccugucuuucagaucucaaaggcucuuuucagagccaccaaaaaaaaaaaaaaaaaaaaaaaaaaaaaaaaaaaaaaaaaaaaaaaaaaaaaaaaaaaaaaaaaaaaaaaaaaaaaaaaaaaaaaaaaaaaaaaaaaaaa

SEQ ID NO: 1373 - RNA, 938 nt, Artificial Sequence
  mRNA product Design a-1 (hSL-A100) comprising derived and/or modified sequence from RVA/1076/P[6]__AAA47337.1__SP-IgE_P2_VP8*(41-223) (opt4)
aggagagucccgcagucggcguccagcggcucugcuuguucgugugugugucguugcaggccuuauucaagcuuaccauggacuggaccuggauccuguuccugguggccgccgccaccagagugcacagccaguacaucaaggccaacagcaaguucaucggcaucaccgagcugggcagcggcagcggcgcccagaccaacuacgcccccgugaccuggagccacggcgaggugaacgacagcaccaccaucgagcccgugcuggacggccccuaccagcccaccagcuucaagccccccagcgacuacuggauccugcugaaccccaccaaccagcagguggugcuggagggcaccaacaagaccgacaucuggguggcccugcugcugguggagcccaacgugaccaaccagagcagacaguacacccuguucggcgagaccaagcagaucaccguggagaacaacaccaacaaguggaaguucuucgagauguucagaagcagcgugagcgccgaguuccagcacaagagaacccugaccagcgacaccaagcuggccggcuuccugaaguucuacaacagcguguggaccuucuacggcgagaccccccacgccaccaccgacuacagcagcaccagcaaccugagcgagguggagaccgccauccacguggaguucuacaucauccccagaagccaggagagcaagugcaacgaguacaucaacaccggccugugaggacuagucccuguucccagagcccacuuuuuuuucuuuuuuugaaauaaaauagccugucuuucagaucucaaaggcucuuuucagagccaccaaaaaaaaaaaaaaaaaaaaaaaaaaaaaaaaaaaaaaaaaaaaaaaaaaaaaaaaaaaaaaaaaaaaaaaaaaaaaaaaaaaaaaaaaaaaaaaaaaaaa

SEQ ID NO: 1374 - RNA, 938 nt, Artificial Sequence
  mRNA product Design a-1 (hSL-A100) comprising derived and/or modified sequence from RVA/BE1128/P[8]__AEX30671.1__SP-IgE_P2_VP8*(41-223) (opt4)
aggagagucccgcagucggcguccagcggcucugcuuguucgugugugugucguugcaggccuuauucaagcuuaccauggacuggaccuggauccuguuccugguggccgccgccaccagagugcacagccaguacaucaaggccaacagcaaguucaucggcaucaccgagcugggcagcggcagcggcgcccagaccagauacgcccccgugaacuggggccacggcgagaucaacgacagcaccaccguggagcccauccuggacggccccuaccagcccaccaccuucaccccccccaccgacuacuggauccugaucaccagcaacaccaacggcgugguguacgagagcaccaacaacagcgacuucuggaccgccgugaucgccguggagccccacgugaaccccguggacagacaguacaacguguucggcgagaacaagcaguucaacgugagaaacgacagcgacaaguggaaguuccuggagauguucagaggcagcagccagaacgacuucuacaacagaagaacccugaccagcgacaccagacuggugggcauccugaaguacggcggcagaguguggaccuuccacggcgagacccccagagccaccaccgacagcagcaacaccgccaaccuggacggcaucagcaucaccauccacagcgaguucuacaucauccccagaagccaggagagcaagugcaacgaguacaucaacaacggccugugaggacuagucccuguucccagagcccacuuuuuuuucuuuuuuugaaauaaaauagccugucuuucagaucucaaaggcucuuuucagagccaccaaaaaaaaaaaaaaaaaaaaaaaaaaaaaaaaaaaaaaaaaaaaaaaaaaaaaaaaaaaaaaaaaaaaaaaaaaaaaaaaaaaaaaaaaaaaaaaaaaaaa

SEQ ID NO: 1375 - RNA, 938 nt, Artificial Sequence
  mRNA product Design a-1 (hSL-A100) comprising derived and/or modified sequence from RVA/Wa-VirWa/P[8]__ACR22783.1__SP-IgE_P2_VP8*(41-223) (opt4)
aggagagucccgcagucggcguccagcggcucugcuuguucgugugugugucguugcaggccuuauucaagcuuaccauggacuggaccuggauccuguuccugguggccgccgccaccagagugcacagccaguacaucaaggccaacagcaaguucaucggcaucaccgagcugggcagcggcagcggcgcccagaccagauacgcccccgugaacuggggccacggcgagaucaacgacagcaccaccguggagcccauccuggacggccccuaccagcccaccaccuucaccccccccaacgacuacuggauccugaucaacagcaacaccaacggcgugguguacgagagcaccaacaacagcgacuucuggaccgccgugguggccaucgagccccacgugaaccccguggacagacaguacaccaucuucggcgagagcaagcaguucaacgugagaaacgacagcaacaaguggaaguuccuggagauguucagaagcagcagccagaacgaguucuacaacagaagaacccugaccagcgacaccagacuggugggcauccugaaguacggcggcagaguguggaccuuccacggcgagacccccagagccaccaccgacagcagcagcaccgccaaccugaacaacaucagcaucaccauccacagcgaguucuacaucauccccagaagccaggagagcaagugcaacgaguacaucaacaacggccugugaggacuagucccuguucccagagcccacuuuuuuuucuuuuuuugaaauaaaauagccugucuuucagaucucaaaggcucuuuucagagccaccaaaaaaaaaaaaaaaaaaaaaaaaaaaaaaaaaaaaaaaaaaaaaaaaaaaaaaaaaaaaaaaaaaaaaaaaaaaaaaaaaaaaaaaaaaaaaaaaaaaaa

SEQ ID NO: 1376 - RNA, 938 nt, Artificial Sequence
  mRNA product Design a-1 (hSL-A100) comprising derived and/or modified sequence from RVA/Wa/P[8]__AAA47290.1__SP-IgE_P2_VP8*(41-223) (opt4)
aggagagucccgcagucggcguccagcggcucugcuuguucgugugugugucguugcaggccuuauucaagcuuaccauggacuggaccuggauccuguuccugguggccgccgccaccagagugcacagccaguacaucaaggccaacagcaaguucaucggcaucaccgagcugggcagcggcagcggcgcccagaccagauacgcccccgugaacuggggccacggcgagaucaacgacagcaccaccguggagcccauccuggacggccccuaccagcccaccaccuucaccccccccaacgacuacuggauccugaucaacagcaacaccaacggcgugguguacgagagcaccaacaacagcgacuucuggaccgccgugguggccaucgagccccacgugaaccccguggacagacaguacaccaucuucggcgagagcaagcaguucaacgugagcaacgacagcaacaaguggaaguuccuggagauguucagaagcagcagccagaacgaguucuacaacagaagaacccugaccagcgacaccagauucgugggcauccugaaguacggcggcagaguguggaccuuccacggcgagacccccagagccaccaccgacagcagcagcaccgccaaccugaacaacaucagcaucaccauccacagcgaguucuacaucauccccagaagccaggagagcaagugcaacgaguacaucaacaacggccugugaggacuagucccuguucccagagcccacuuuuuuuucuuuuuuugaaauaaaauagccugucuuucagaucucaaaggcucuuuucagagccaccaaaaaaaaaaaaaaaaaaaaaaaaaaaaaaaaaaaaaaaaaaaaaaaaaaaaaaaaaaaaaaaaaaaaaaaaaaaaaaaaaaaaaaaaaaaaaaaaaaaaa

SEQ ID NO: 1377 - RNA, 938 nt, Artificial Sequence
  mRNA product Design a-1 (hSL-A100) comprising derived and/or modified sequence from RVA/Wa/P[8]__AAA66953.1__SP-IgE_P2_VP8*(41-223) (opt4)
aggagagucccgcagucggcguccagcggcucugcuuguucgugugugugucguugcaggccuuauucaagcuuaccauggacuggaccuggauccuguuccugguggccgccgccaccagagugcacagccaguacaucaaggccaacagcaaguucaucggcaucaccgagcugggcagcggcagcggcgcccagaccagauacgcccccgugaacuggggccacggcgagaucaacgacagcaccaccguggagcccaugcuggacggccccuaccagcccaccaccuucaccccccccaacgacuacuggauccugaucaacagcaacaccaacggcgugguguacgagagcaccaacaacagcgacuucuggaccgccgugguggccaucgagccccacgugaaccccguggacagacaguacaccaucuucggcgagagcaagcaguucaacgugagcaacgacagcaacaaguggaaguuccuggagauguucagaagcagcagccagaacgaguucuacaacagaagaacccugaccagcgacaccagauucgugggcauccugaaguacggcggcagaguguggaccuuccacggcgagacccccagagccaccaccgacagcagcagcaccgccaaccugaacaacaucagcaucaccauccacagcgaguucuacaucauccccagaagccaggagagcaagugcaacgaguacaucaacaacggccugugaggacuagucccuguucccagagcccacuuuuuuuucuuuuuuugaaauaaaauagccugucuuucagaucucaaaggcucuuuucagagccaccaaaaaaaaaaaaaaaaaaaaaaaaaaaaaaaaaaaaaaaaaaaaaaaaaaaaaaaaaaaaaaaaaaaaaaaaaaaaaaaaaaaaaaaaaaaaaaaaaaaaa

SEQ ID NO: 1378 - RNA, 815 nt, Artificial Sequence
  mRNA product Design a-1 (hSL-A100) comprising derived and/or modified sequence from RVA/BE1058/P[4]__AEX30665.1__P2_VP8*(65-223) (opt5)
aggagagucccgcagucggcguccagcggcucugcuuguucgugugugugucguugcaggccuuauucaagcuuaccaugcaguacaucaaggccaacagcaaauucauuggcaucaccgagcugggguccggaucuggccucgacgggcccuaucaaccuacaacguuuaagccgcccaaugauuacuggcugcuuauuagcuccaacaccgacggaguggucuaugaaucuacaaauaacagcgauuucuggaccgcuguuaucgccguggagccucacgugaaucagacaaacagacaguacguccuguuuggcgaaaauaaacaguucaacauugagaauagcucugacaaguggaaauuuuucgaaauguuuaaggggaacagccaauccgauuucagcaaucggcgcacccucacaucuuccaacagacuggugggaaugcuuaaguauggcggccggguuuggaccuuucauggggagacgccccgcgcgaccacagacuccucuuccaccgcugaucugaauaacaucagcaucauuauccacucugaguucuacauuaucccuagaucccaggaaagcaaaugcaaugaguauauuaacaacggacucugaggacuagucccuguucccagagcccacuuuuuuuucuuuuuuugaaauaaaauagccugucuuucagaucucaaaggcucuuuucagagccaccaaaaaaaaaaaaaaaaaaaaaaaaaaaaaaaaaaaaaaaaaaaaaaaaaaaaaaaaaaaaaaaaaaaaaaaaaaaaaaaaaaaaaaaaaaaaaaaaaaaaa

SEQ ID NO: 1379 - RNA, 815 nt, Artificial Sequence
  mRNA product Design a-1 (hSL-A100) comprising derived and/or modified sequence from RVA/DS-1/P[4]__CAD62680.1__P2_VP8*(65-223) (opt5)
aggagagucccgcagucggcguccagcggcucugcuuguucgugugugugucguugcaggccuuauucaagcuuaccaugcaguacaucaaggccaacagcaaauucauuggcaucaccgagcugggguccggaucuggccucgacgggcccuaucaaccuacaacguuuaagccgcccaaugauuacuggcugcuuauuagcuccaacaccaauggaguggucuaugaaucuacaaacaauaacgacuucuggaccgcuguuagcuccguggagccucacgugucucagacaaauagacaguacauccuguuuggcgaaaacaaacaguucaaugucgagaacaauagcgauaaguggaaauuuuucgaaaccuuuacaggguccagccaaggaaacuucucuaaucggcgcacccucacguccagcaacagacuggugggcaugcuuaaguauggcgggcggguuuggaccuuucauggagagacaccccgcgccaccacagacucuuccaauaccgcggaucugaacaacauuagcaucaucauucacucugaguucuacaucauuccuagaucccaggaaagcaagugcaaugaguauaucaacaauggccucugaggacuagucccuguucccagagcccacuuuuuuuucuuuuuuugaaauaaaauagccugucuuucagaucucaaaggcucuuuucagagccaccaaaaaaaaaaaaaaaaaaaaaaaaaaaaaaaaaaaaaaaaaaaaaaaaaaaaaaaaaaaaaaaaaaaaaaaaaaaaaaaaaaaaaaaaaaaaaaaaaaaaa

SEQ ID NO: 1380 - RNA, 815 nt, Artificial Sequence; identical to SEQ ID NO: 1379
  mRNA product Design a-1 (hSL-A100) comprising derived and/or modified sequence from RVA/DS-1/P[4]__ABV53252.1__P2_VP8*(65-223) (opt5)

SEQ ID NO: 1381 - RNA, 815 nt, Artificial Sequence
  mRNA product Design a-1 (hSL-A100) comprising derived and/or modified sequence from RVA/F01322/P[6]__AFA51886.1__P2_VP8*(65-223) (opt5)
aggagagucccgcagucggcguccagcggcucugcuuguucgugugugugucguugcaggccuuauucaagcuuaccaugcaguacaucaaggccaacagcaaauucauuggcaucaccgagcugggguccggaucuggccucgacgggcccuaucaaccuacaaauuuuaagccgcccaacgauuacuggauucugcuuaauccuacgaaccaacaggugguccuggaaggaaccaauaaaacagacaucuggguugcucuccugcuuguggagcccaacgugaccaaucagagcagacaguauacacuguucggcgaaaccaagcagauuacagucgagaacaauaccaacaaauggaaguuuuucgaaauguuucgguccucugugagcgccgaguuccagcacaagcgcacgcucaccuccgauacaaaacuggcgggguuuaugaaguucuacaauucuguuuggaccuuucauggagagacaccuaacgcuaccacggacuauagcuccacaagcaaucuguucgaaguggagaccgucauccacguggaauuuuacaucauucccagaucucaggaguccaaaugcagcgaguauaucaacacaggccucugaggacuagucccuguucccagagcccacuuuuuuuucuuuuuuugaaauaaaauagccugucuuucagaucucaaaggcucuuuucagagccaccaaaaaaaaaaaaaaaaaaaaaaaaaaaaaaaaaaaaaaaaaaaaaaaaaaaaaaaaaaaaaaaaaaaaaaaaaaaaaaaaaaaaaaaaaaaaaaaaaaaaa

SEQ ID NO: 1382 - RNA, 815 nt, Artificial Sequence
  mRNA product Design a-1 (hSL-A100) comprising derived and/or modified sequence from RVA/1076/P[6]__AAA47337.1__P2_VP8*(65-223) (opt5)
aggagagucccgcagucggcguccagcggcucugcuuguucgugugugugucguugcaggccuuauucaagcuuaccaugcaguacaucaaggccaacagcaaauucauuggcaucaccgagcugggguccggaucuggccucgacgggcccuaucaaccuacgagcuuuaagccgcccuccgauuacuggauucugcuuaauccuacaaaccaacaggugguccuggaaggaaccaauaaaacagacaucuggguugcucuccugcuuguggagcccaacgugaccaaucagucuagacaguauacacuguucggcgaaaccaagcagauuacagucgagaacaauaccaacaaauggaaguuuuucgaaauguuucggagcuccgugucugccgaguuccagcacaagcgcacgcucaccagcgauacaaaacuggcgggguuucugaaguucuacaauuccguuuggaccuuuuauggagagacaccucaugcuaccacggacuacagcucuacauccaaccucagcgaaguggagaccgccauccacgucgaguucuauaucauucccagaucucaggaauccaaaugcaaugaguacaucaacacaggccugugaggacuagucccuguucccagagcccacuuuuuuuucuuuuuuugaaauaaaauagccugucuuucagaucucaaaggcucuuuucagagccaccaaaaaaaaaaaaaaaaaaaaaaaaaaaaaaaaaaaaaaaaaaaaaaaaaaaaaaaaaaaaaaaaaaaaaaaaaaaaaaaaaaaaaaaaaaaaaaaaaaaaa

SEQ ID NO: 1383 - RNA, 815 nt, Artificial Sequence
  mRNA product Design a-1 (hSL-A100) comprising derived and/or modified sequence from RVA/BE1128/P[8]__AEX30671.1__P2_VP8*(65-223) (opt5)
aggagagucccgcagucggcguccagcggcucugcuuguucgugugugugucguugcaggccuuauucaagcuuaccaugcaguacaucaaggccaacagcaaauucauuggcaucaccgagcugggguccggaucuggccucgacgggcccuaucaaccuacaacguuuaccccgcccacagauuacuggauucugaucaccagcaauacaaacggaguggucuaugaauccaccaauaacucugacuucuggacagcuguuauugccguggagccucacgugaaucccgucgauagacaguacaacguguuuggcgaaaauaagcaguucaacguucggaaugacagcgauaaauggaaguuucuugagauguuccgcggguccucucagaacgacuuuuauaauagacggacccugacgagcgauacccgccucgugggaauccugaaauacggcggcagagucuggacauuccauggggaaaccccucgggcgacaaccgacuccagcaacacggcuaaucuugauggaaucucuauuacaauccacuccgaguuuuauauuaucccccgcagccaagagucuaagugcaacgaauacauuaauaacggccugugaggacuagucccuguucccagagcccacuuuuuuuucuuuuuuugaaauaaaauagccugucuuucagaucucaaaggcucuuuucagagccaccaaaaaaaaaaaaaaaaaaaaaaaaaaaaaaaaaaaaaaaaaaaaaaaaaaaaaaaaaaaaaaaaaaaaaaaaaaaaaaaaaaaaaaaaaaaaaaaaaaaaa

SEQ ID NO: 1384 - RNA, 815 nt, Artificial Sequence
  mRNA product Design a-1 (hSL-A100) comprising derived and/or modified sequence from RVA/Wa-VirWa/P[8]__ACR22783.1__P2_VP8*(65-223) (opt5)
aggagagucccgcagucggcguccagcggcucugcuuguucgugugugugucguugcaggccuuauucaagcuuaccaugcaguacaucaaggccaacagcaaauucauuggcaucaccgagcugggguccggaucuggccucgacgggcccuaucaaccuacaacguuuaccccgcccaaugauuacuggauucugaucaacagcaauacaaacggaguggucuaugaauccaccaauaacucugacuucuggacagcuguuguggccauugagccucacgugaaucccgucgauagacaguacaccaucuuuggcgaaagcaagcaguucaacgugcggaaugacuccaacaaauggaaguuucuugagauguuccgcucuagcucccagaaugaauuuuauaacagacggacacugaccagcgauacgcgccucguugggauccugaaauacggaggcagaguguggaccuuccauggcgagacaccucgggcgaccacagacucuuccagcaccgcuaaucuuaacaauauuucuaucacgauucacuccgaguuuuauaucauuccccgcagccaagaaucuaagugcaacgaguacaucaacaaugggcugugaggacuagucccuguucccagagcccacuuuuuuuucuuuuuuugaaauaaaauagccugucuuucagaucucaaaggcucuuuucagagccaccaaaaaaaaaaaaaaaaaaaaaaaaaaaaaaaaaaaaaaaaaaaaaaaaaaaaaaaaaaaaaaaaaaaaaaaaaaaaaaaaaaaaaaaaaaaaaaaaaaaaa

SEQ ID NO: 1385 - RNA, 815 nt, Artificial Sequence
  mRNA product Design a-1 (hSL-A100) comprising derived and/or modified sequence from RVA/Wa/P[8]__AAA47290.1__P2_VP8*(65-223) (opt5)
aggagagucccgcagucggcguccagcggcucugcuuguucgugugugugucguugcaggccuuauucaagcuuaccaugcaguacaucaaggccaacagcaaauucauuggcaucaccgagcugggguccggaucuggccucgacgggcccuaucaaccuacaacguuuaccccgcccaaugauuacuggauucugaucaacagcaauacaaacggaguggucuaugaauccaccaauaacucugacuucuggacagcuguuguggccauugagccucacgugaaucccgucgauagacaguacaccaucuuuggcgaaagcaagcaguucaacguguccaaugacucuaacaaauggaaguuucuugagauguuccggagcuccagccagaaugaauuuuauaaccgcagaacacugaccucugauacgcgguucguugggauccucaaauacggaggccgcguguggaccuuucauggcgagacaccuagagcgaccacagacuccagcucuaccgcuaaucugaacaauauuuccaucacgauucacagcgaguucuauaucauuccccggucucaagaauccaagugcaacgaguacaucaacaaugggcuuugaggacuagucccuguucccagagcccacuuuuuuuucuuuuuuugaaauaaaauagccugucuuucagaucucaaaggcucuuuucagagccaccaaaaaaaaaaaaaaaaaaaaaaaaaaaaaaaaaaaaaaaaaaaaaaaaaaaaaaaaaaaaaaaaaaaaaaaaaaaaaaaaaaaaaaaaaaaaaaaaaaaaa

SEQ ID NO: 1386 - RNA, 815 nt, Artificial Sequence; identical to SEQ ID NO: 1385
  mRNA product Design a-1 (hSL-A100) comprising derived and/or modified sequence from RVA/Wa/P[8]__AAA66953.1__P2_VP8*(65-223) (opt5)

SEQ ID NO: 1387 - RNA, 887 nt, Artificial Sequence
  mRNA product Design a-1 (hSL-A100) comprising derived and/or modified sequence from RVA/BE1058/P[4]__AEX30665.1__P2_VP8*(41-223) (opt5)
aggagagucccgcagucggcguccagcggcucugcuuguucgugugugugucguugcaggccuuauucaagcuuaccaugcaguacaucaaggccaacagcaaauucauuggcaucaccgagcugggguccggaucuggcgcucaaacaagauaugcccccgugaauugggggcacggagaaauuaacgacagcacgaccgucgagccuguucucgauggcccguaccagcccacaaccuuuaagccucccaaugacuauuggcugcuuaucuccucuaacacagauggggugguguacgaaagcaccaauaacuccgacuucuggacagcggucauugcuguggagccucauguuaaucagaccaaccggcaguaugugcuguuuggagaaaauaaacaauucaacaucgaaaauucuagcgauaaguggaaauuuuucgagauguuuaagggcaacucccagagcgacuucucuaaucgcagaacgcucaccuccagcaaccggcuggucggcaugcuuaaguacgggggacgcguguggacauuucacggcgagacccccagagccacaaccgauucuuccagcacggccgaccugaauaacaucucuauuaucauucauuccgaguucuauaucauuccucggagccaggaauccaaaugcaacgaguacaucaauaacgggcucugaggacuagucccuguucccagagcccacuuuuuuuucuuuuuuugaaauaaaauagccugucuuucagaucucaaaggcucuuuucagagccaccaaaaaaaaaaaaaaaaaaaaaaaaaaaaaaaaaaaaaaaaaaaaaaaaaaaaaaaaaaaaaaaaaaaaaaaaaaaaaaaaaaaaaaaaaaaaaaaaaaaaa

SEQ ID NO: 1388 - RNA, 887 nt, Artificial Sequence
  mRNA product Design a-1 (hSL-A100) comprising derived and/or modified sequence from RVA/DS-1/P[4]__CAD62680.1__P2_VP8*(41-223) (opt5)
aggagagucccgcagucggcguccagcggcucugcuuguucgugugugugucguugcaggccuuauucaagcuuaccaugcaguacaucaaggccaacagcaaauucauuggcaucaccgagcugggguccggaucuggcgcucaaacaagauaugcccccgugaauugggggagcugggaaauuaacgacuccacgaccgucgagccuguucucgauggaccguaccagcccacaaccuuuaagccucccaaugacuauuggcugcuuaucucuagcaacacaaauggcgugguguacgaauccaccaacaauaacgauuucuggacagcggucucuagcguggagccucacguuucccagaccaaucggcaguauauucuguuuggggaaaacaaacaauucaauguggagaacaauagcgacaaguggaaauuuuucgagacguuuaccggaucuucccagggcaacuucagcaaucgcagaacacucaccucuuccaaccggcuggucggcaugcuuaaguacgggggacgcguguggacauuucauggcgaaacccccagagcuacgacagauagcucuaacaccgccgaccugaauaacaucuccaucauuauccacagcgaguucuauauuaucccucggucccaggaaucuaagugcaaugaguacauuaacaaugggcucugaggacuagucccuguucccagagcccacuuuuuuuucuuuuuuugaaauaaaauagccugucuuucagaucucaaaggcucuuuucagagccaccaaaaaaaaaaaaaaaaaaaaaaaaaaaaaaaaaaaaaaaaaaaaaaaaaaaaaaaaaaaaaaaaaaaaaaaaaaaaaaaaaaaaaaaaaaaaaaaaaaaaa

SEQ ID NO: 1389 - RNA, 887 nt, Artificial Sequence; identical to SEQ ID NO: 1388
  mRNA product Design a-1 (hSL-A100) comprising derived and/or modified sequence from RVA/DS-1/P[4]__ABV53252.1__P2_VP8*(41-223) (opt5)

SEQ ID NO: 1390 - RNA, 887 nt, Artificial Sequence
  mRNA product Design a-1 (hSL-A100) comprising derived and/or modified sequence from RVA/F01322/P[6]__AFA51886.1__P2_VP8*(41-223) (opt5)
aggagagucccgcagucggcguccagcggcucugcuuguucgugugugugucguugcaggccuuauucaagcuuaccaugcaguacaucaaggccaacagcaaauucauuggcaucaccgagcugggguccggaucuggcgcucaaacaaauuaugcccccgugacguggagccacggggaagucaacgacuccaccacaauugagccuguucucgauggaccguaccagcccaccaauuuuaagccucccaacgacuauuggauccugcuuaauccuacaaaccaacagguggugcuggaaggcaccaauaaaacagauauuugggucgcgcuccugcuuguggagcccaacguuaccaaucagucuagacaguacacgcuguucggggaaaccaagcagaucacaguggagaacaauaccaacaaauggaaguuuuucgagauguuucggagcuccgucucugcugaguuccagcauaagcgcacacucaccagcgacacgaaacuggccggauuuaugaaguucuauaauuccguguggacauuucacggcgaaaccccuaacgccacaaccgauuacagcucuaccuccaaucuguucgaaguugagacagugauccaugucgaguuuuauauuaucccgagaagccaagaaucuaaaugcuccgaguacauuaacacgggccucugaggacuagucccuguucccagagcccacuuuuuuuucuuuuuuugaaauaaaauagccugucuuucagaucucaaaggcucuuuucagagccaccaaaaaaaaaaaaaaaaaaaaaaaaaaaaaaaaaaaaaaaaaaaaaaaaaaaaaaaaaaaaaaaaaaaaaaaaaaaaaaaaaaaaaaaaaaaaaaaaaaaaa

SEQ ID NO: 1391 - RNA, 887 nt, Artificial Sequence
  mRNA product Design a-1 (hSL-A100) comprising derived and/or modified sequence from RVA/1076/P[6]__AAA47337.1__P2_VP8*(41-223) (opt5)
aggagagucccgcagucggcguccagcggcucugcuuguucgugugugugucguugcaggccuuauucaagcuuaccaugcaguacaucaaggccaacagcaaauucauuggcaucaccgagcugggguccggaucuggcgcucaaacaaauuaugcccccgugacguggagccacggggaagucaacgacuccaccacaauugagccuguucucgauggaccguaccagcccaccucuuuuaagccucccagcgacuauuggauccugcuuaauccuacaaaccaacagguggugcuggaaggcaccaauaaaacagauauuugggucgcgcuccugcuuguggagcccaacguuaccaaucaguccagacaguacacgcuguucggggaaaccaagcagaucacaguggagaacaauaccaacaaauggaaguuuuucgagauguuucggucuagcgucuccgcugaguuccagcauaagcgcacacucaccagcgacacgaaacuggccggauuucugaaguucuauaauucuguguggacauuuuacggcgaaaccccucacgccacaaccgauuauuccagcaccucuaaccucuccgaaguugagacagcuauccauguggaguucuacauuaucccgagaagccaagaaucuaaaugcaaugaguacauuaacacgggccugugaggacuagucccuguucccagagcccacuuuuuuuucuuuuuuugaaauaaaauagccugucuuucagaucucaaaggcucuuuucagagccaccaaaaaaaaaaaaaaaaaaaaaaaaaaaaaaaaaaaaaaaaaaaaaaaaaaaaaaaaaaaaaaaaaaaaaaaaaaaaaaaaaaaaaaaaaaaaaaaaaaaaa

SEQ ID NO: 1392 - RNA, 887 nt, Artificial Sequence
  mRNA product Design a-1 (hSL-A100) comprising derived and/or modified sequence from RVA/BE1128/P[8]__AEX30671.1__P2_VP8*(41-223) (opt5)
aggagagucccgcagucggcguccagcggcucugcuuguucgugugugugucguugcaggccuuauucaagcuuaccaugcaguacaucaaggccaacagcaaauucauuggcaucaccgagcugggguccggaucuggcgcucaaacaagauaugcccccgugaauugggggcacggagaaauuaacgacagcacgaccgucgagccuauccucgauggcccguaccagcccacaaccuuuacaccucccaccgacuauuggauucugaucacauccaauaccaacgggguuguguacgaaucuacgaauaacagcgauuucuggaccgcggugaucgcugucgagccucaugugaaucccguugaccggcaguauaacguguuuggagaaaauaagcaguucaacguccgcaaugauuccgacaaauggaaguuucuugagauguucagaggcucuagccaaaacgauuuuuacaaucggcgcacacugaccuccgacacaagacucgugggcauucugaaauaugggggacggguuuggaccuuccacggcgagacgccucgcgccacaaccgauagcucuaacacagccaaucuugacgggaucuccauuaccauccauagcgaauuuuacauuaucccgagaucucaggaguccaagugcaacgaauacauuaacaauggacugugaggacuagucccuguucccagagcccacuuuuuuuucuuuuuuugaaauaaaauagccugucuuucagaucucaaaggcucuuuucagagccaccaaaaaaaaaaaaaaaaaaaaaaaaaaaaaaaaaaaaaaaaaaaaaaaaaaaaaaaaaaaaaaaaaaaaaaaaaaaaaaaaaaaaaaaaaaaaaaaaaaaaa

SEQ ID NO: 1393 - RNA, 887 nt, Artificial Sequence
  mRNA product Design a-1 (hSL-A100) comprising derived and/or modified sequence from RVA/Wa-VirWa/P[8]__ACR22783.1__P2_VP8*(41-223) (opt5)
aggagagucccgcagucggcguccagcggcucugcuuguucgugugugugucguugcaggccuuauucaagcuuaccaugcaguacaucaaggccaacagcaaauucauuggcaucaccgagcugggguccggaucuggcgcucaaacaagauaugcccccgugaauugggggcacggagaaauuaacgacagcacgaccgucgagccuauccucgauggcccguaccagcccacaaccuuuacaccucccaaugacuauuggauucugaucaacuccaauaccaacgggguuguguacgaaucuacaaauaacagcgauuucuggaccgcgguggucgcuaucgagccucaugugaaucccguugaccggcaguauacgauuuuuggagaauccaagcaguucaacgugcgcaaugauucuaacaaauggaaguuucuugagauguucagaagcuccagccaaaaugaguuuuacaaccggcgcacccugacaucugacaccagacucgucggcauccugaaauauggcgggcggguguggacauuccacggagaaaccccucgcgccacgacagauuccagcucuaccgccaaucuuaacaacauuuccaucacaauucauagcgaguuuuacaucauuccgagaucucaggaauccaagugcaaugaguacaucaacaauggccugugaggacuagucccuguucccagagcccacuuuuuuuucuuuuuuugaaauaaaauagccugucuuucagaucucaaaggcucuuuucagagccaccaaaaaaaaaaaaaaaaaaaaaaaaaaaaaaaaaaaaaaaaaaaaaaaaaaaaaaaaaaaaaaaaaaaaaaaaaaaaaaaaaaaaaaaaaaaaaaaaaaaaa

SEQ ID NO: 1394 - RNA, 887 nt, Artificial Sequence
  mRNA product Design a-1 (hSL-A100) comprising derived and/or modified sequence from RVA/Wa/P[8]__AAA47290.1__P2_VP8*(41-223) (opt5)
aggagagucccgcagucggcguccagcggcucugcuuguucgugugugugucguugcaggccuuauucaagcuuaccaugcaguacaucaaggccaacagcaaauucauuggcaucaccgagcugggguccggaucuggcgcucaaacaagauaugcccccgugaauugggggcacggagaaauuaacgacagcacgaccgucgagccuauccucgauggcccguaccagcccacaaccuuuacaccucccaaugacuauuggauucugaucaacuccaauaccaacgggguuguguacgaaucuacaaauaacagcgauuucuggaccgcgguggucgcuaucgagccucaugugaaucccguugaccggcaguauacgauuuuuggagaauccaagcaguucaacgugucuaaugauagcaacaaauggaaguuucuugagauguuccgcuccagcucucaaaaugaguuuuacaacagacggacccugacauccgacacccgcuucgucggcauccucaaauauggcgggagaguguggacauuucacggagaaaccccucgggccacgacagauucuagcuccaccgccaaucugaacaacauuagcaucacaauucauucugaguucuacaucauuccgcgcucccaggaaagcaagugcaaugaguacaucaacaauggccuuugaggacuagucccuguucccagagcccacuuuuuuuucuuuuuuugaaauaaaauagccugucuuucagaucucaaaggcucuuuucagagccaccaaaaaaaaaaaaaaaaaaaaaaaaaaaaaaaaaaaaaaaaaaaaaaaaaaaaaaaaaaaaaaaaaaaaaaaaaaaaaaaaaaaaaaaaaaaaaaaaaaaaa

SEQ ID NO: 1395 - RNA, 887 nt, Artificial Sequence
  mRNA product Design a-1 (hSL-A100) comprising derived and/or modified sequence from RVA/Wa/P[8]__AAA66953.1__P2_VP8*(41-223) (opt5)
aggagagucccgcagucggcguccagcggcucugcuuguucgugugugugucguugcaggccuuauucaagcuuaccaugcaguacaucaaggccaacagcaaauucauuggcaucaccgagcugggguccggaucuggcgcucaaacaagauaugcccccgugaauugggggcacggagaaauuaacgacagcacgaccgucgagccuaugcucgauggcccguaccagcccacaaccuuuacaccucccaaugacuauuggauccugauuaacuccaauaccaacgggguuguguacgaaucuacaaauaacagcgauuucuggaccgcgguggucgcuaucgagccucaugugaaucccguugaccggcaguauacgaucuuuggagaauccaagcaguucaacgugucuaaugauagcaacaaauggaaguuucuugagauguuccgcuccagcucucaaaaugaguuuuacaacagacggacccugacauccgacacccgcuucgucggcauucucaaauauggcgggagaguguggacauuucacggagaaaccccucgggccacgacagauucuagcuccaccgccaaucugaacaacaucagcauuacaauccauucugaguucuacauuaucccgcgcucccaggaaagcaagugcaaugaguacauuaacaauggccuuugaggacuagucccuguucccagagcccacuuuuuuuucuuuuuuugaaauaaaauagccugucuuucagaucucaaaggcucuuuucagagccaccaaaaaaaaaaaaaaaaaaaaaaaaaaaaaaaaaaaaaaaaaaaaaaaaaaaaaaaaaaaaaaaaaaaaaaaaaaaaaaaaaaaaaaaaaaaaaaaaaaaaa

SEQ ID NO: 1396 - RNA, 1313 nt, Artificial Sequence
  mRNA product Design a-1 (hSL-A100) comprising derived and/or modified sequence from RVA/BE1058/P[4]__AEX30665.1__P2_VP8*(65-223)_Ferritin (opt5)
aggagagucccgcagucggcguccagcggcucugcuuguucgugugugugucguugcaggccuuauucaagcuuaccaugcaguacaucaaggccaacagcaaauucauuggcaucaccgagcugggguccggaucuggccucgacgggcccuaucaaccuacaacguuuaagccgcccaaugauuacuggcugcuuauuagcuccaacaccgacggaguggucuaugaaucuacaaauaacagcgauuucuggaccgcuguuaucgccguggagccucacgugaaucagacaaacagacaguacguccuguuuggcgaaaauaaacaguucaacauugagaauagcucugacaaguggaaauuuuucgaaauguuuaaggggaacagccaauccgauuucagcaaucggcgcacccucacaucuuccaacagacuggugggaaugcuuaaguauggcggccggguuuggaccuuucauggggagacgccccgcgcgaccacagacuccucuuccaccgcugaucugaauaacaucagcaucauuauccacucugaguucuacauuaucccuagaucccaggaaagcaaaugcaaugaguauauuaacaacggacucuccggcggggacaucauuaagcugcugaaugaacaggugaacaaagagaugcagucuagcaaucucuacauguccaugagcucuugguguuacacacauucccuggauggagccggccuuuuucuguucgaccacgccgcugaggaauaugagcaugccaagaaacucaucaucuuucugaacgaaaauaacguccccgugcaacuuaccagcauuucugcuccugagcacaaguucgaagggcugacgcagaucuuccagaaggccuacgagcacgagcagcauauuagcgaauccaucaauaacauuguugaucacgcgaucaaaucuaaggaccaugccacauuuaauuuccuccaaugguauguggcugagcagcacgaagaggaaguccuguuuaaagauauccuggacaagauugagcucaucggaaacgagaaucacggccuguaccuugccgaccaguaugugaaaggcauugcuaagagccggaaauccugaggacuagucccuguucccagagcccacuuuuuuuucuuuuuuugaaauaaaauagccugucuuucagaucucaaaggcucuuuucagagccaccaaaaaaaaaaaaaaaaaaaaaaaaaaaaaaaaaaaaaaaaaaaaaaaaaaaaaaaaaaaaaaaaaaaaaaaaaaaaaaaaaaaaaaaaaaaaaaaaaaaaa

SEQ ID NO: 1397 - RNA, 1313 nt, Artificial Sequence
  mRNA product Design a-1 (hSL-A100) comprising derived and/or modified sequence from RVA/DS-1/P[4]__CAD62680.1__P2_VP8*(65-223)_Ferritin (opt5)
aggagagucccgcagucggcguccagcggcucugcuuguucgugugugugucguugcaggccuuauucaagcuuaccaugcaguacaucaaggccaacagcaaauucauuggcaucaccgagcugggguccggaucuggccucgacgggcccuaucaaccuacaacguuuaagccgcccaaugauuacuggcugcuuauuagcuccaacaccaauggaguggucuaugaaucuacaaacaauaacgacuucuggaccgcuguuagcuccguggagccucacgugucucagacaaauagacaguacauccuguuuggcgaaaacaaacaguucaaugucgagaacaauagcgauaaguggaaauuuuucgaaaccuuuacaggguccagccaaggaaacuucucuaaucggcgcacccucacguccagcaacagacuggugggcaugcuuaaguauggcgggcggguuuggaccuuucauggagagacaccccgcgccaccacagacucuuccaauaccgcggaucugaacaacauuagcaucaucauucacucugaguucuacaucauuccuagaucccaggaaagcaagugcaaugaguauaucaacaauggccucuccgggggagacauuaucaaacugcugaacgaacaggugaauaaggagaugcagucuagcaaccucuacauguccaugagcucuugguguuacacgcauucccuggauggcgcugggcuuuuucuguucgaccacgccgccgaggaauaugagcaugcuaaaaagcucauuaucuuucugaaugaaaacaauguccccgugcaacuuacaagcaucucugccccugagcacaaauucgaaggacugacccagauuuuccagaaggcuuacgagcacgagcagcauaucagcgaauccauuaacaauaucguugaucacgccauuaagucuaaagaccaugcgacauuuaacuuccuccaaugguauguggccgagcagcacgaagaggaaguccuguuuaaggauauccuggacaaaaucgagcucauuggcaaugagaaccacggccuguaccuugcugaucaguaugugaaggggaucgccaaaagccggaaguccugaggacuagucccuguucccagagcccacuuuuuuuucuuuuuuugaaauaaaauagccugucuuucagaucucaaaggcucuuuucagagccaccaaaaaaaaaaaaaaaaaaaaaaaaaaaaaaaaaaaaaaaaaaaaaaaaaaaaaaaaaaaaaaaaaaaaaaaaaaaaaaaaaaaaaaaaaaaaaaaaaaaaa

SEQ ID NO: 1398 - RNA, 1313 nt, Artificial Sequence; identical to SEQ ID NO: 1397
  mRNA product Design a-1 (hSL-A100) comprising derived and/or modified sequence from RVA/DS-1/P[4]__ABV53252.1__P2_VP8*(65-223)_Ferritin (opt5)

SEQ ID NO: 1399 - RNA, 1313 nt, Artificial Sequence
  mRNA product Design a-1 (hSL-A100) comprising derived and/or modified sequence from RVA/F01322/P[6]__AFA51886.1__P2_VP8*(65-223)_Ferritin (opt5)
aggagagucccgcagucggcguccagcggcucugcuuguucgugugugugucguugcaggccuuauucaagcuuaccaugcaguacaucaaggccaacagcaaauucauuggcaucaccgagcugggguccggaucuggccucgacgggcccuaucaaccuacaaauuuuaagccgcccaacgauuacuggauucugcuuaauccuacgaaccaacaggugguccuggaaggaaccaauaaaacagacaucuggguugcucuccugcuuguggagcccaacgugaccaaucagagccggcaguauacacuguucggcgaaaccaagcagauuacagucgagaacaauaccaacaaauggaaguuuuucgaaauguuucgguccucugugagcgccgaguuccagcacaagcgcacgcucaccuccgauacaaaacuggcgggguuuaugaaguucuacaauucuguuuggaccuuucauggagagacaccuaacgcuaccacggacuauagcuccacaagcaaucuguucgaaguggagaccgucauccacguggaauuuuacaucauucccagaucucaggaguccaaaugcagcgaguauaucaacacaggccucucuggcggggauauuaucaagcugcuuaaugaacaaguuaacaaagagaugcaguccagcaaccuguacaugucuauguccagcugguguuacacccauucccucgacggagccggccuguuccuuuuugaucacgccgcugaagaguaugaacaugccaagaagcugauuaucuuccucaaugagaacaaugugccuguccagcugaccucuauuagcgcuccggagcacaaauucgaagggcugacacagaucuuucaaaaggccuacgagcacgaacagcauaucuccgagagcauuaacaauaucguggaccacgcgauuaaaucuaaggaucaugccacguucaacuuucuccagugguauguggcugaacaacacgaggaggaaguccuguucaaagacauccuugauaagauugagcugaucggaaaugaaaaccacggccucuaccuggccgaccaguauguuaaagggaucgcuaaguccagaaagagcugaggacuagucccuguucccagagcccacuuuuuuuucuuuuuuugaaauaaaauagccugucuuucagaucucaaaggcucuuuucagagccaccaaaaaaaaaaaaaaaaaaaaaaaaaaaaaaaaaaaaaaaaaaaaaaaaaaaaaaaaaaaaaaaaaaaaaaaaaaaaaaaaaaaaaaaaaaaaaaaaaaaaa

SEQ ID NO: 1400 - RNA, 1313 nt, Artificial Sequence
  mRNA product Design a-1 (hSL-A100) comprising derived and/or modified sequence from RVA/1076/P[6]__AAA47337.1__P2_VP8*(65-223)_Ferritin (opt5)
aggagagucccgcagucggcguccagcggcucugcuuguucgugugugugucguugcaggccuuauucaagcuuaccaugcaguacaucaaggccaacagcaaauucauuggcaucaccgagcugggguccggaucuggccucgacgggcccuaucaaccuacgagcuuuaagccgcccuccgauuacuggauucugcuuaauccuacaaaccaacaggugguccuggaaggaaccaauaaaacagacaucuggguugcucuccugcuuguggagcccaacgugaccaaucagucucggcaguauacacuguucggcgaaaccaagcagauuacagucgagaacaauaccaacaaauggaaguuuuucgaaauguuucggagcuccgugucugccgaguuccagcacaagcgcacgcucaccagcgauacaaaacuggcgggguuucugaaguucuacaauuccguuuggaccuuuuauggagagacaccucaugcuaccacggacuacagcucuacauccaaccucagcgaaguggagaccgccauccacgucgaguucuauaucauucccagaucucaggaauccaaaugcaaugaguacaucaacacaggccugagcggcggggauauuaucaaacuucugaaugaacaagugaacaaggagaugcagucuuccaaucucuacaugagcauguccucuugguguuauacccauagccuggacggagccggccuuuuucuguucgaucacgcugccgaagaguacgaacaugcuaagaagcucauuaucuuucugaacgagaacaauguuccugugcagcugaccuccauuagcgccccggagcacaaauucgaagggcucacacagaucuuccaaaaggcguaugagcacgaacagcauaucucugaguccauuaacaauaucgucgaccacgccauuaaaagcaaggaucaugcuacguuuaacuuccugcagugguacguggccgaacaacacgaggaggaagugcuuuuuaaagacauccuggauaagauugagcucaucggaaaugaaaaccacggccuguaucuugcugaccaguacgucaaagggaucgccaagucuagaaagagcugaggacuagucccuguucccagagcccacuuuuuuuucuuuuuuugaaauaaaauagccugucuuucagaucucaaaggcucuuuucagagccaccaaaaaaaaaaaaaaaaaaaaaaaaaaaaaaaaaaaaaaaaaaaaaaaaaaaaaaaaaaaaaaaaaaaaaaaaaaaaaaaaaaaaaaaaaaaaaaaaaaaaa

SEQ ID NO: 1401 - RNA, 1313 nt, Artificial Sequence
  mRNA product Design a-1 (hSL-A100) comprising derived and/or modified sequence from RVA/BE1128/P[8]__AEX30671.1__P2_VP8*(65-223)_Ferritin (opt5)
aggagagucccgcagucggcguccagcggcucugcuuguucgugugugugucguugcaggccuuauucaagcuuaccaugcaguacaucaaggccaacagcaaauucauuggcaucaccgagcugggguccggaucuggccucgacgggcccuaucaaccuacaacguuuaccccgcccacagauuacuggauucugaucaccagcaauacaaacggaguggucuaugaauccaccaauaacucugacuucuggacagcuguuauugccguggagccucacgugaaucccgucgauagacaguacaacguguuuggcgaaaauaagcaguucaacguucggaaugacagcgauaaauggaaguuucuugagauguuccgcggguccucucagaacgacuuuuauaauagacggacccugacgagcgauacccgccucgugggaauccugaaauacggcggcagagucuggacauuccauggggaaaccccucgggcgacaaccgacuccagcaacacggcuaaucuugauggaaucucuauuacaauccacuccgaguuuuauauuaucccccgcagccaagagucuaagugcaacgaauacauuaauaacggccuguccgggggagacaucauuaagcuccugaacgaacaggugaauaaagagaugcagagcucuaaccuguacauguccaugagcuccugguguuauacccauucucucgauggcgccgggcuguuccuuuuugaccacgccgcugaggaguacgaacaugccaagaaacugaucaucuuccucaaugagaacaauguuccugugcagcugacaagcauuuccgcuccggaacacaaguuugagggacuuacccaaaucuuccagaaagccuaugaacacgagcagcauauuagcgagucuaucaacaauauugucgaucacgcgaucaaguccaaggaccaugccaccuucaacuuucugcagugguacguggcugaacaacacgaggaagagguccucuucaaagacauccuggauaagauugaacugaucggcaaugagaaccacggccucuaucuggccgaccaguacgugaaagggauugcuaagagcagaaaaucuugaggacuagucccuguucccagagcccacuuuuuuuucuuuuuuugaaauaaaauagccugucuuucagaucucaaaggcucuuuucagagccaccaaaaaaaaaaaaaaaaaaaaaaaaaaaaaaaaaaaaaaaaaaaaaaaaaaaaaaaaaaaaaaaaaaaaaaaaaaaaaaaaaaaaaaaaaaaaaaaaaaaaa

SEQ ID NO: 1402 - RNA, 1313 nt, Artificial Sequence
  mRNA product Design a-1 (hSL-A100) comprising derived and/or modified sequence from RVA/Wa-VirWa/P[8]__ACR22783.1__P2_VP8*(65-223)_Ferritin (opt5)
aggagagucccgcagucggcguccagcggcucugcuuguucgugugugugucguugcaggccuuauucaagcuuaccaugcaguacaucaaggccaacagcaaauucauuggcaucaccgagcugggguccggaucuggccucgacgggcccuaucaaccuacaacguuuaccccgcccaaugauuacuggauucugaucaacagcaauacaaacggagugguguaugaauccaccaauaacucugacuucuggacagcuguuguggccauugagccucacgugaaucccgucgauagacaguacaccaucuuuggcgaaagcaagcaguucaacgugcggaaugacuccaacaaauggaaguuucuugagauguuccgcucuagcucccagaaugaauuuuauaacagacggacacugaccagcgauacgcgccucguugggauccugaaauacggaggcagaguguggaccuuccauggcgagacaccucgggcgaccacagacucuuccagcaccgcuaaucuuaacaauauuucuaucacgauucacuccgaguuuuauaucauuccccgcagccaagaaucuaagugcaacgaguacaucaacaaugggcuguccggaggcgauauuaucaagcuccugaacgaacaggucaauaaagagaugcagagcuccaaccuguacaugucuaugagcuccugguguuauacacauagccucgacggggccggacuguuccuuuuugaucacgccgcugaggaauacgagcaugccaagaaacugaucauuuuccucaaugaaaacaaugugccuguucagcugaccucuaucuccgcuccggagcacaaguuugaaggccuuacacaaauuuuccagaaagccuaugagcacgagcagcauaucagcgaaucuauuaacaauaucguggaccacgcgaucaagagcaaggaucaugccaccuucaacuuucugcagugguacgucgcugagcaacacgaagaggaaguccucuucaaagacauucuggauaagaucgagcugauugggaaugagaaccacggacucuaucuggccgaccaguacgugaaaggcaucgcuaaguccagaaaaucuugaggacuagucccuguucccagagcccacuuuuuuuucuuuuuuugaaauaaaauagccugucuuucagaucucaaaggcucuuuucagagccaccaaaaaaaaaaaaaaaaaaaaaaaaaaaaaaaaaaaaaaaaaaaaaaaaaaaaaaaaaaaaaaaaaaaaaaaaaaaaaaaaaaaaaaaaaaaaaaaaaaaaa

SEQ ID NO: 1403 - RNA, 1313 nt, Artificial Sequence
  mRNA product Design a-1 (hSL-A100) comprising derived and/or modified sequence from RVA/Wa/P[8]__AAA47290.1__P2_VP8*(65-223)_Ferritin (opt5)
aggagagucccgcagucggcguccagcggcucugcuuguucgugugugugucguugcaggccuuauucaagcuuaccaugcaguacaucaaggccaacagcaaauucauuggcaucaccgagcugggguccggaucuggccucgacgggcccuaucaaccuacaacguuuaccccgcccaaugauuacuggauucugaucaacagcaauacaaacggaguggucuaugaauccaccaauaacucugacuucuggacagcuguuguggccauugagccucacgugaaucccgucgauagacaguacaccaucuuuggcgaaagcaagcaguucaacguguccaaugacucuaacaaauggaaguuucuugagauguuccggagcuccagccagaaugaauuuuauaaccgcagaacacugaccucugauacgcgguucguugggauccucaaauacggaggccgcguguggaccuuucauggcgagacaccuagagcgaccacagacuccagcucuaccgcuaaucugaacaauauuuccaucacgauucacagcgaguucuauaucauuccccggucucaagaauccaagugcaacgaguacaucaacaaugggcuuagcggaggcgauauuaucaagcugcucaacgaacaggucaauaaagagaugcaguccucuaaccuguacaugagcauguccagcugguguuauacacauucucuggacggggccggacucuuucuguucgaucacgccgcugaggaauacgagcaugccaagaaacuuaucauuuuucugaaugaaaacaaugugccuguucagcucaccuccaucagcgcuccggagcacaaguucgaaggccugacacaaauuuuccagaaagccuaugagcacgagcagcauaucucugaaagcauuaacaauaucguggaccacgcgaucaaguccaaggaucaugccaccuuuaacuuccuucagugguacgucgcugagcaacacgaagaggaagugcuguuuaaagacauucucgauaagaucgagcugauugggaaugagaaccacggacuguaucucgccgaccaguacgugaaaggcaucgcuaagucucgcaaaagcugaggacuagucccuguucccagagcccacuuuuuuuucuuuuuuugaaauaaaauagccugucuuucagaucucaaaggcucuuuucagagccaccaaaaaaaaaaaaaaaaaaaaaaaaaaaaaaaaaaaaaaaaaaaaaaaaaaaaaaaaaaaaaaaaaaaaaaaaaaaaaaaaaaaaaaaaaaaaaaaaaaaaa

SEQ ID NO: 1404 - RNA, 1313 nt, Artificial Sequence; identical to SEQ ID NO: 1403
  mRNA product Design a-1 (hSL-A100) comprising derived and/or modified sequence from RVA/Wa/P[8]__AAA66953.1__P2_VP8*(65-223)_Ferritin (opt5)

SEQ ID NO: 1405 - RNA, 1385 nt, Artificial Sequence
  mRNA product Design a-1 (hSL-A100) comprising derived and/or modified sequence from RVA/BE1058/P[4]__AEX30665.1__P2_VP8*(41-223)_Ferritin (opt5)
aggagagucccgcagucggcguccagcggcucugcuuguucgugugugugucguugcaggccuuauucaagcuuaccaugcaguacaucaaggccaacagcaaauucauuggcaucaccgagcugggguccggaucuggcgcucaaacaagauaugcccccgugaauugggggcacggagaaauuaacgacagcacgaccgucgagccuguucucgauggcccguaccagcccacaaccuuuaagccucccaaugacuauuggcugcuuaucuccucuaacacagauggggugguguacgaaagcaccaauaacuccgacuucuggacagcggucauugcuguggagccucauguuaaucagaccaaccggcaguaugugcuguuuggagaaaauaaacaauucaacaucgaaaauucuagcgauaaguggaaauuuuucgagauguuuaagggcaacucccagagcgacuucucuaaucgcagaacgcucaccuccagcaaccggcuggucggcaugcuuaaguacgggggacgcguguggacauuucacggcgagacccccagagccacaaccgauucuuccagcacggccgaccugaauaacaucucuauuaucauucauuccgaguucuauaucauuccucggagccaggaauccaaaugcaacgaguacaucaauaacgggcucucuggaggcgauauuaucaagcugcugaaugagcagguuaacaaagaaaugcaaagcuccaaucucuacaugagcaugucuuccugguguuauacacacagccuggacggggcuggacuuuuucuguucgaucaugccgcugaggaauacgagcacgccaagaaacucaucauuuuucugaacgaaaauaacgugccgguccagcuuaccucuaucagcgcgcccgagcacaaguucgagggccugacacagauuuuccagaaggccuaugaacaugagcaacacaucuccgaaucuauuaauaacaucguggaccaugcuaucaaaagcaaggaucacgccaccuuuaauuuccuccagugguacguggcugagcagcacgaagaggagguccuguuuaaagacauucuggacaagaucgaacucauuggcaacgagaaucaugggcuguaucuugccgaucaauacguuaaaggaaucgcgaagucccgcaaaagcugaggacuagucccuguucccagagcccacuuuuuuuucuuuuuuugaaauaaaauagccugucuuucagaucucaaaggcucuuuucagagccaccaaaaaaaaaaaaaaaaaaaaaaaaaaaaaaaaaaaaaaaaaaaaaaaaaaaaaaaaaaaaaaaaaaaaaaaaaaaaaaaaaaaaaaaaaaaaaaaaaaaaa

SEQ ID NO: 1406 - RNA, 1385 nt, Artificial Sequence
  mRNA product Design a-1 (hSL-A100) comprising derived and/or modified sequence from RVA/DS-1/P[4]__CAD62680.1__P2_VP8*(41-223)_Ferritin (opt5)
aggagagucccgcagucggcguccagcggcucugcuuguucgugugugugucguugcaggccuuauucaagcuuaccaugcaguacaucaaggccaacagcaaauucauuggcaucaccgagcugggguccggaucuggcgcucaaacaagauaugcccccgugaauugggggagcugggaaauuaacgacuccacgaccgucgagccuguucucgauggaccguaccagcccacaaccuuuaagccucccaaugacuauuggcugcuuaucucuagcaacacaaauggcgugguguacgaauccaccaacaauaacgauuucuggacagcggucucuagcguggagccucacguuucccagaccaaucggcaguauauucuguuuggggaaaacaaacaauucaauguggagaacaauagcgacaaguggaaauuuuucgagacguuuaccggaucuucccagggcaacuucagcaaucgcagaacacucaccucuuccaaccggcuggucggcaugcuuaaguacgggggacgcguguggacauuucauggcgaaacccccagagcuacgacagauagcucuaacaccgccgaccugaauaacaucuccaucauuauccacagcgaguucuauauuaucccucggucccaggaaucuaagugcaaugaguacauuaacaaugggcucagcggaggcgauaucauuaaacugcugaacgagcagguuaauaaggaaaugcaauccagcaaccucuacaugucuauguccagcugguguuauacacauucucuggacggggccggacuuuuucuguucgaucacgcugccgaggaauacgagcaugcuaaaaagcucaucaucuuucugaaugaaaacaaugugccgguccagcuuaccagcauuuccgcccccgagcacaaauucgagggccugacccagaucuuccagaaggcguaugaacacgagcaacauauuucugaaagcaucaacaauauuguggaccacgccaucaaguccaaagaucaugcuacauuuaacuuccuccagugguacguggccgagcagcacgaagaggagguccuguuuaaggacauccuggauaaaauugaacucaucggcaaugagaaccacgggcuguaucuugcugaccaauacguuaagggaauugccaaaagccgcaagucuugaggacuagucccuguucccagagcccacuuuuuuuucuuuuuuugaaauaaaauagccugucuuucagaucucaaaggcucuuuucagagccaccaaaaaaaaaaaaaaaaaaaaaaaaaaaaaaaaaaaaaaaaaaaaaaaaaaaaaaaaaaaaaaaaaaaaaaaaaaaaaaaaaaaaaaaaaaaaaaaaaaaaa

SEQ ID NO: 1407 - RNA, 1385 nt, Artificial Sequence; identical to SEQ ID NO: 1406
  mRNA product Design a-1 (hSL-A100) comprising derived and/or modified sequence from RVA/DS-1/P[4]__ABV53252.1__P2_VP8*(41-223)_Ferritin (opt5)

SEQ ID NO: 1408 - RNA, 1385 nt, Artificial Sequence
  mRNA product Design a-1 (hSL-A100) comprising derived and/or modified sequence from RVA/F01322/P[6]__AFA51886.1__P2_VP8*(41-223)_Ferritin (opt5)
aggagagucccgcagucggcguccagcggcucugcuuguucgugugugugucguugcaggccuuauucaagcuuaccaugcaguacaucaaggccaacagcaaauucauuggcaucaccgagcugggguccggaucuggcgcucaaacaaauuaugcccccgugacguggagccacggggaagucaacgacuccaccacaauugagccuguucucgauggaccguaccagcccaccaauuuuaagccucccaacgacuauuggauccugcuuaauccuacaaaccaacagguggugcuggaaggcaccaauaaaacagauauuugggucgcgcuccugcuuguggagcccaacguuaccaaucagucucggcaguacacgcuguucggggaaaccaagcagaucacaguggagaacaauaccaacaaauggaaguuuuucgagauguuucggagcuccgucucugcugaguuccagcauaagcgcacacucaccagcgacacgaaacuggccggauuuaugaaguucuauaauuccguguggacauuucacggcgaaaccccuaacgccacaaccgauuacagcucuaccuccaaucuguucgaaguugagacagugauccaugucgaguuuuauauuaucccgagaagccaagaaucuaaaugcuccgaguacauuaacacgggccucagcgggggagacaucauuaagcugcuuaacgaacaggugaauaaagagaugcagucuuccaaccuguacaugagcauguccucuugguguuauacccacagccucgauggcgcugggcuguuccuuuuugaccaugccgcugaagaguacgagcacgccaagaagcugaucauuuuccucaaugaaaacaaugugcccguccagcugacauccaucagcgcgccugagcacaaauucgaaggacugacccaaaucuuucagaaggccuaugagcaugaacagcacauuucugaguccaucaacaauauuguugaucaugcuaucaaaagcaaggaccacgccacauucaacuuucuccaaugguacguggcugagcagcacgaagaggaagugcuguucaaagauauucuugacaagaucgagcugaucggcaaugaaaaccaugggcucuaucuggccgaucaguacgucaaaggaauugcgaagucuagaaagagcugaggacuagucccuguucccagagcccacuuuuuuuucuuuuuuugaaauaaaauagccugucuuucagaucucaaaggcucuuuucagagccaccaaaaaaaaaaaaaaaaaaaaaaaaaaaaaaaaaaaaaaaaaaaaaaaaaaaaaaaaaaaaaaaaaaaaaaaaaaaaaaaaaaaaaaaaaaaaaaaaaaaaa

SEQ ID NO: 1409 - RNA, 1385 nt, Artificial Sequence
  mRNA product Design a-1 (hSL-A100) comprising derived and/or modified sequence from RVA/1076/P[6]__AAA47337.1__P2_VP8*(41-223)_Ferritin (opt5)
aggagagucccgcagucggcguccagcggcucugcuuguucgugugugugucguugcaggccuuauucaagcuuaccaugcaguacaucaaggccaacagcaaauucauuggcaucaccgagcugggguccggaucuggcgcucaaacaaauuaugcccccgugacguggagccacggggaagucaacgacuccaccacaauugagccuguucucgauggaccguaccagcccaccucuuuuaagccucccagcgacuauuggauccugcuuaauccuacaaaccaacagguggugcuggaaggcaccaauaaaacagauauuugggucgcgcuccugcuuguggagcccaacguuaccaaucaguccagacaguacacgcuguucggggaaaccaagcagaucacaguggagaacaauaccaacaaauggaaguuuuucgagauguuucggucuagcgucuccgcugaguuccagcauaagcgcacacucaccagcgacacgaaacuggccggauuucugaaguucuauaauucuguguggacauuuuacggcgaaaccccucacgccacaaccgauuauuccagcaccucuaaccucuccgaaguugagacagcuauccauguggaguucuacauuaucccgagaagccaagaaucuaaaugcaaugaguacauuaacacgggccuguccgggggagacaucauuaaacuucugaaugaacaggucaacaaggagaugcagagcuccaaccucuauaugucuaugagcuccugguguuacacccacagccuggauggcgccgggcuuuuucuguucgaccaugcugccgaagaguaugagcacgcgaagaagcucaucauuuuucugaaugaaaacaaugugcccgugcagcugacaucuaucuccgccccugagcacaaauucgaaggacucacccaaaucuuccagaaggcuuacgagcaugaacagcacauuagcgagucuaucaacaauauugucgaucaugccaucaaaagcaaggaccacgcuacauuuaacuuccugcaaugguauguugccgagcagcacgaagaggaagugcuuuuuaaagauauucuggacaagaucgagcucaucggcaaugaaaaccaugggcuguaccuugcggaucaguaugugaaaggaauugccaagucccggaagucuugaggacuagucccuguucccagagcccacuuuuuuuucuuuuuuugaaauaaaauagccugucuuucagaucucaaaggcucuuuucagagccaccaaaaaaaaaaaaaaaaaaaaaaaaaaaaaaaaaaaaaaaaaaaaaaaaaaaaaaaaaaaaaaaaaaaaaaaaaaaaaaaaaaaaaaaaaaaaaaaaaaaaa

SEQ ID NO: 1410 - RNA, 1385 nt, Artificial Sequence
  mRNA product Design a-1 (hSL-A100) comprising derived and/or modified sequence from RVA/BE1128/P[8]__AEX30671.1__P2_VP8*(41-223)_Ferritin (opt5)
aggagagucccgcagucggcguccagcggcucugcuuguucgugugugugucguugcaggccuuauucaagcuuaccaugcaguacaucaaggccaacagcaaauucauuggcaucaccgagcugggguccggaucuggcgcucaaacaagauaugcccccgugaauugggggcacggagaaauuaacgacagcacgaccgucgagccuauccucgauggcccguaccagcccacaaccuuuacaccucccaccgacuauuggauucugaucacauccaauaccaacgggguuguguacgaaucuacgaauaacagcgauuucuggaccgcggugaucgcugucgagccucaugugaaucccguugaccggcaguauaacguguuuggagaaaauaagcaguucaacguccgcaaugauuccgacaaauggaaguuucuugagauguucagaggcucuagccaaaacgauuuuuacaaucggcgcacacugaccuccgacacaagacucgugggcauucugaaauaugggggacggguuuggaccuuccacggcgagacgccucgcgccacaaccgauagcucuaacacagccaaucuugacgggaucuccauuaccauccauagcgaauuuuacauuaucccgagaucucaggaguccaagugcaacgaauacauuaacaauggacugagcggcggggauaucaucaagcuccugaacgaacaggugaauaaagagaugcagucuuccaaccuguauaugagcauguccucuugguguuacacccacagccucgacggagcuggccuguuccuuuuugaucaugccgcugaggaguaugaacacgccaagaaacugauuaucuuccucaaugagaacaauguccccgugcaacugacauccauuagcgcgccugaacacaaguuugagggccuuacgcagaucuuccagaaagccuacgagcaugaacagcacauuucugaguccaucaacaauaucguggaccaugcuauuaagagcaaggaccacgccaccuucaacuuucugcaaugguaugucgcugaacagcacgaggaagagguucucuucaaagauauccuggacaagauugagcugaucgggaaugaaaaccauggacucuaccuggccgaucaguaugugaaaggcauugcgaagucucggaaaagcugaggacuagucccuguucccagagcccacuuuuuuuucuuuuuuugaaauaaaauagccugucuuucagaucucaaaggcucuuuucagagccaccaaaaaaaaaaaaaaaaaaaaaaaaaaaaaaaaaaaaaaaaaaaaaaaaaaaaaaaaaaaaaaaaaaaaaaaaaaaaaaaaaaaaaaaaaaaaaaaaaaaaa

SEQ ID NO: 1411 - RNA, 1385 nt, Artificial Sequence
  mRNA product Design a-1 (hSL-A100) comprising derived and/or modified sequence from RVA/Wa-VirWa/P[8]__ACR22783.1__P2_VP8*(41-223)_Ferritin (opt5)
aggagagucccgcagucggcguccagcggcucugcuuguucgugugugugucguugcaggccuuauucaagcuuaccaugcaguacaucaaggccaacagcaaauucauuggcaucaccgagcugggguccggaucuggcgcucaaacaagauaugcccccgugaauugggggcacggagaaauuaacgacagcacgaccgucgagccuauccucgauggcccguaccagcccacaaccuuuacaccucccaaugacuauuggauucugaucaacuccaauaccaacgggguuguguacgaaucuacaaauaacagcgauuucuggaccgcgguggucgcuaucgagccucaugugaaucccguugaccggcaguauacgauuuuuggagaauccaagcaguucaacgugcgcaaugauucuaacaaauggaaguuucuugagauguucagaagcuccagccaaaaugaguuuuacaaccggcgcacccugacaucugacaccagacucgucggcauccugaaauauggcgggcggguguggacauuccacggagaaaccccucgcgccacgacagauuccagcucuaccgccaaucuuaacaacauuuccaucacaauucauagcgaguuuuacaucauuccgagaucucaggaauccaagugcaaugaguacaucaacaauggccugagcgggggagacaucauuaagcuccugaacgagcagguuaauaaagaaaugcaguccucuaaccuguauaugagcauguccagcugguguuacacccacucucucgauggcgcugggcuguuccuuuuugaccaugccgcugaggaauaugagcacgccaagaaacugaucauuuuccucaaugaaaacaaugugcccguccaacugaccuccaucagcgcgccugagcacaaguuugagggacuuacacagauuuuccagaaagccuacgaacaugagcagcacaucucugaaagcaucaacaauauuguggaucaugcuaucaaguccaaggaccacgccacguucaacuuucugcaaugguauguggcugagcagcacgaagaggagguccucuucaaagauauucuggacaagaucgaacugauuggcaaugagaaccauggccucuaccuggccgaccaguauguuaaagggaucgcgaagucucggaaaagcugaggacuagucccuguucccagagcccacuuuuuuuucuuuuuuugaaauaaaauagccugucuuucagaucucaaaggcucuuuucagagccaccaaaaaaaaaaaaaaaaaaaaaaaaaaaaaaaaaaaaaaaaaaaaaaaaaaaaaaaaaaaaaaaaaaaaaaaaaaaaaaaaaaaaaaaaaaaaaaaaaaaaa

SEQ ID NO: 1412 - RNA, 1385 nt, Artificial Sequence
  mRNA product Design a-1 (hSL-A100) comprising derived and/or modified sequence from RVA/Wa/P[8]__AAA47290.1__P2_VP8*(41-223)_Ferritin (opt5)
aggagagucccgcagucggcguccagcggcucugcuuguucgugugugugucguugcaggccuuauucaagcuuaccaugcaguacaucaaggccaacagcaaauucauuggcaucaccgagcugggguccggaucuggcgcucaaacaagauaugcccccgugaauugggggcacggagaaauuaacgacagcacgaccgucgagccuauccucgauggcccguaccagcccacaaccuuuacaccucccaaugacuauuggauucugaucaacuccaauaccaacgggguuguguacgaaucuacaaauaacagcgauuucuggaccgcgguggucgcuaucgagccucaugugaaucccguugaccggcaguauacgauuuuuggagaauccaagcaguucaacgugucuaaugauagcaacaaauggaaguuucuugagauguuccgcuccagcucucaaaaugaguuuuacaacagacggacccugacauccgacacccgcuucgucggcauccucaaauauggcgggagaguguggacauuucacggagaaaccccucgggccacgacagauagcagcuccaccgccaaucugaacaacauuagcaucacaauucauucugaguucuacaucauuccgcgcucccaggaaagcaagugcaaugaguacaucaacaauggccuuuccgggggagacaucauuaagcugcucaacgagcagguuaauaaagaaaugcagucuagcaaccuguauauguccaugagcucuugguguuacacccacucccuggauggcgcugggcucuuucuguucgaccaugccgcugaggaauaugagcacgccaagaaacuuaucauuuuucugaaugaaaacaaugugcccguccaacucaccagcaucucugcgccugagcacaaguucgagggacugacacagauuuuccagaaagccuacgaacaugagcagcacaucagcgaauccaucaacaauauuguggaucaugcuaucaagucuaaggaccacgccacguuuaacuuccuucaaugguauguggcugagcagcacgaagaggagguccuguuuaaagauauucucgacaagaucgaacugauuggcaaugagaaccauggccuguaccucgccgaccaguauguuaaagggaucgcgaagucuagaaaauccugaggacuagucccuguucccagagcccacuuuuuuuucuuuuuuugaaauaaaauagccugucuuucagaucucaaaggcucuuuucagagccaccaaaaaaaaaaaaaaaaaaaaaaaaaaaaaaaaaaaaaaaaaaaaaaaaaaaaaaaaaaaaaaaaaaaaaaaaaaaaaaaaaaaaaaaaaaaaaaaaaaaaa

SEQ ID NO: 1413 - RNA, 1385 nt, Artificial Sequence
  mRNA product Design a-1 (hSL-A100) comprising derived and/or modified sequence from RVA/Wa/P[8]__AAA66953.1__P2_VP8*(41-223)_Ferritin (opt5)
aggagagucccgcagucggcguccagcggcucugcuuguucgugugugugucguugcaggccuuauucaagcuuaccaugcaguacaucaaggccaacagcaaauucauuggcaucaccgagcugggguccggaucuggcgcucaaacaagauaugcccccgugaauugggggcacggagaaauuaacgacagcacgaccgucgagccuaugcucgauggcccguaccagcccacaaccuuuacaccucccaaugacuauuggauccugauuaacuccaauaccaacgggguuguguacgaaucuacaaauaacagcgauuucuggaccgcgguggucgcuaucgagccucaugugaaucccguugaccggcaguauacgaucuuuggagaauccaagcaguucaacgugucuaaugauagcaacaaauggaaguuucuugagauguuccgcuccagcucucaaaaugaguuuuacaacagacggacccugacauccgacacccgcuucgucggcauucucaaauauggcgggagaguguggacauuucacggagaaaccccucgggccacgacagauagcagcuccaccgccaaucugaacaacaucagcauuacaauccauucugaguucuacauuaucccgcgcucccaggaaagcaagugcaaugaguacauuaacaauggccuuuccgggggagacaucaucaagcugcucaacgagcagguuaauaaagaaaugcagucuagcaaccuguauauguccaugagcucuugguguuacacccacucccuggauggcgcugggcucuuucuguucgaccaugccgcugaggaauaugagcacgccaagaaacuuauuaucuuucugaaugaaaacaaugugcccguccaacucaccagcauuucugcgccugagcacaaguucgagggacugacacagaucuuccagaaagccuacgaacaugagcagcacauuagcgaauccaucaacaauaucguggaucaugcuauuaagucuaaggaccacgccacguuuaacuuccuucaaugguauguggcugagcagcacgaagaggagguccuguuuaaagauauccucgacaagauugaacugaucggcaaugagaaccauggccuguaccucgccgaccaguauguuaaagggauugcgaagucuagaaaauccugaggacuagucccuguucccagagcccacuuuuuuuucuuuuuuugaaauaaaauagccugucuuucagaucucaaaggcucuuuucagagccaccaaaaaaaaaaaaaaaaaaaaaaaaaaaaaaaaaaaaaaaaaaaaaaaaaaaaaaaaaaaaaaaaaaaaaaaaaaaaaaaaaaaaaaaaaaaaaaaaaaaaa

SEQ ID NO: 1414 - RNA, 1319 nt, Artificial Sequence
  mRNA product Design a-1 (hSL-A100) comprising derived and/or modified sequence from RVA/BE1058/P[4]__AEX30665.1__LumSynt_P2_VP8*(65-223) (opt5)
aggagagucccgcagucggcguccagcggcucugcuuguucgugugugugucguugcaggccuuauucaagcuuaccaugcagaucuacgagggcaagcugaccgccgaagggcucagauucggaauuguggcuagccgguuuaaccacgcccuggucgaccgccuuguugagggcgcgaucgaugcuauugugagacaugggggacgggaagaggacaucacacuggugcgcguccccggcuccugggaaauuccuguggccgccggggagcucgcuagaaaagaggauaucgacgccguuaucgcuauuggagugcugauccggggcgccacgccgcacuucgauuauauugcgucugaagucagcaagggccuugccgaccugucccucgagcugcgcaaacccaucaccuuuggggugauuacagcugauacccuggaacaagccaucgagagagcuggaacaaagcauggcaauaaagggugggaggccgcgcucucugccauugaaauggcuaaccuguucaagagccuucggggaggcuccgggggaucuggcggcagcgggggauccggcgggggacaguacaucaaggccaauagcaaauuuaucggcauuaccgagcuggggucuggauccggccucgacggcccuuaucagcccacaaccuucaagccucccaacgauuacuggcugcuuaucagcucuaauacggacgggguuguguaugaauccaccaacaauagcgauuuuuggacagcugucauugccguggagccucacgugaaccagaccaaucgccaauacguccuguucggagaaaacaaacaguuuaauaucgagaacucuuccgacaaguggaaauucuuugagauguucaagggcaauagccaguccgauuuuucuaacagacggacacucaccagcuccaaucgccugguugggaugcugaaguauggaggcagaguguggacguuccauggggaaacaccgcgggccaccacagacucuagcuccaccgcugaccucaacaacauuagcaucaucauucacucugaguucuacaucauuccccgcagccaggaauccaaaugcaaugaguacaucaacaauggccugugaggacuagucccuguucccagagcccacuuuuuuuucuuuuuuugaaauaaaauagccugucuuucagaucucaaaggcucuuuucagagccaccaaaaaaaaaaaaaaaaaaaaaaaaaaaaaaaaaaaaaaaaaaaaaaaaaaaaaaaaaaaaaaaaaaaaaaaaaaaaaaaaaaaaaaaaaaaaaaaaaaaaa

SEQ ID NO: 1415 - RNA, 1319 nt, Artificial Sequence
  mRNA product Design a-1 (hSL-A100) comprising derived and/or modified sequence from RVA/DS-1/P[4]__CAD62680.1__LumSynt_P2_VP8*(65-223) (opt5)
aggagagucccgcagucggcguccagcggcucugcuuguucgugugugugucguugcaggccuuauucaagcuuaccaugcagaucuacgagggcaagcugaccgccgaagggcucagauucggaauuguggcuagccgguuuaaccacgcccuggucgaccgccuuguugagggcgcgaucgaugcuauugugagacaugggggacgggaagaggacaucacacuggugcgcguccccggcuccugggaaauuccuguggccgccggggagcucgcuagaaaagaggauaucgacgccguuaucgcuauuggagugcugauccggggcgccacgccgcacuucgauuauauugcgucugaagucagcaagggccuugccgaccugucccucgagcugcgcaaacccaucaccuuuggggugauuacagcugauacccuggaacaagccaucgagagagcuggaacaaagcauggcaauaaagggugggaggccgcgcucucugccauugaaauggcuaaccuguucaagagccuucggggaggcuccgggggaucuggcggcagcgggggauccggcgggggacaguacaucaaggccaauagcaaauuuaucggcauuaccgagcuggggucuggauccggccucgacggcccuuaucagcccacaaccuucaagccucccaacgauuacuggcugcuuaucagcucuaauacgaacgggguuguguaugaauccaccaauaacaaugacuuuuggacagcugucagcucuguggagccucacgugucccagaccaaccgccaauacauucuguucggagaaaauaaacaguuuaacgucgagaauaacagcgauaaguggaaauucuuugagacauucaccggcuccucucaggggaauuuuagcaacagacggacgcucacauccagcaaccgccugguuggaaugcugaaguauggcgggagaguguggaccuuccauggcgaaacaccgcgggccaccaccgacucuuccaauacagccgaucucaacaauaucagcauuaucauccacucugaguucuacauuaucccccgcagccaggaauccaagugcaacgaguacauuaauaacggacugugaggacuagucccuguucccagagcccacuuuuuuuucuuuuuuugaaauaaaauagccugucuuucagaucucaaaggcucuuuucagagccaccaaaaaaaaaaaaaaaaaaaaaaaaaaaaaaaaaaaaaaaaaaaaaaaaaaaaaaaaaaaaaaaaaaaaaaaaaaaaaaaaaaaaaaaaaaaaaaaaaaaaa

SEQ ID NO: 1416 - RNA, 1319 nt, Artificial Sequence; identical to SEQ ID NO: 1415
  mRNA product Design a-1 (hSL-A100) comprising derived and/or modified sequence from RVA/DS-1/P[4]__ABV53252.1__LumSynt_P2_VP8*(65-223) (opt5)

SEQ ID NO: 1417 - RNA, 1319 nt, Artificial Sequence
  mRNA product Design a-1 (hSL-A100) comprising derived and/or modified sequence from RVA/F01322/P[6]__AFA51886.1__LumSynt_P2_VP8*(65-223) (opt5)
aggagagucccgcagucggcguccagcggcucugcuuguucgugugugugucguugcaggccuuauucaagcuuaccaugcagaucuacgagggcaagcugaccgccgaagggcucagauucggaauuguggcuagccgguuuaaccacgcccuggucgaccgccuuguugagggcgcgaucgaugcuauugugagacaugggggacgggaagaggacaucacacuggugcgcguccccggcuccugggaaauuccuguggccgccggggagcucgcuagaaaagaggauaucgacgccguuaucgcuauuggagugcugauccggggcgccacgccgcacuucgauuauauugcgucugaagucagcaagggccuugccgaccugucccucgagcugcgcaaacccaucaccuuuggggugauuacagcugauacccuggaacaagccaucgagagagcuggaacaaagcauggcaauaaagggugggaggccgcgcucucugccauugaaauggcuaaccuguucaagagccuucggggaggcuccgggggaucuggcggcagcgggggauccggcgggggacaguacaucaaggccaauagcaaauuuaucggcauuaccgagcuggggucuggauccggccucgacggcccuuaucagcccacaaacuucaagccucccaaugauuacuggauccugcuuaacccuaccaaucagcaaguugugcuggaagggacgaacaaaaccgacauuugggucgcucuccugcugguggagccgaaugugacaaaccagagccgccaguauacccucuuuggagaaacaaagcagaucaccgucgagaauaacacgaauaaauggaaguucuuugagauguucagaucuuccguuagcgccgaauuucaacacaagcggacacugaccucugauacaaaacuugccggcuucaugaaguuuuacaacuccguguggaccuuccauggggagacccccaaugcuacaacggacuauagcuccaccucuaaccuguucgaaguggagacagucauucacguggaauuuuacaucaucccucgcagccaggaguccaaaugcagcgaguacauuaacaccggacucugaggacuagucccuguucccagagcccacuuuuuuuucuuuuuuugaaauaaaauagccugucuuucagaucucaaaggcucuuuucagagccaccaaaaaaaaaaaaaaaaaaaaaaaaaaaaaaaaaaaaaaaaaaaaaaaaaaaaaaaaaaaaaaaaaaaaaaaaaaaaaaaaaaaaaaaaaaaaaaaaaaaaa

SEQ ID NO: 1418 - RNA, 1319 nt, Artificial Sequence
  mRNA product Design a-1 (hSL-A100) comprising derived and/or modified sequence from RVA/1076/P[6]__AAA47337.1__LumSynt_P2_VP8*(65-223) (opt5)
aggagagucccgcagucggcguccagcggcucugcuuguucgugugugugucguugcaggccuuauucaagcuuaccaugcagaucuacgagggcaagcugaccgccgaagggcucagauucggaauuguggcuagccgguuuaaccacgcccuggucgaccgccuuguugagggcgcgaucgaugcuauugugagacaugggggacgggaagaggacaucacacuggugcgcguccccggcuccugggaaauuccuguggccgccggggagcucgcuagaaaagaggauaucgacgccguuaucgcuauuggagugcugauccggggcgccacgccgcacuucgauuauauugcgucugaagucagcaagggccuugccgaccugucccucgagcugcgcaaacccaucaccuuuggggugauuacagcugauacccuggaacaagccaucgagagagcuggaacaaagcauggcaauaaagggugggaggccgcgcucucugccauugaaauggcuaaccuguucaagagccuucggggaggcuccgggggaucuggcggcagcgggggauccggcgggggacaguacaucaaggccaauagcaaauuuaucggcauuaccgagcuggggucuggauccggccucgacggcccuuaucagcccaccagcuucaagccucccucugauuacuggauccugcuuaacccuaccaaucagcaaguugugcuggaagggacgaacaaaaccgacauuugggucgcucuccugcugguggagccgaaugugacaaaccagucccgccaguauacccucuuuggagaaacaaagcagaucaccgucgagaauaacacgaauaaauggaaguucuuugagauguucagaagcucuguuuccgccgaauuucaacacaagcggacacugaccagcgauacaaaacuugccggcuuccugaaguuuuacaacuccguguggaccuucuauggggagacaccccaugcuacaacggacuacucuagcaccuccaaucucagcgaaguggagacagcgauucacgucgaguucuacaucaucccucgcucucaggaauccaaaugcaacgaguauauuaauaccggacugugaggacuagucccuguucccagagcccacuuuuuuuucuuuuuuugaaauaaaauagccugucuuucagaucucaaaggcucuuuucagagccaccaaaaaaaaaaaaaaaaaaaaaaaaaaaaaaaaaaaaaaaaaaaaaaaaaaaaaaaaaaaaaaaaaaaaaaaaaaaaaaaaaaaaaaaaaaaaaaaaaaaaa

SEQ ID NO: 1419 - RNA, 1319 nt, Artificial Sequence
  mRNA product Design a-1 (hSL-A100) comprising derived and/or modified sequence from RVA/BE1128/P[8]__AEX30671.1__LumSynt_P2_VP8*(65-223) (opt5)
aggagagucccgcagucggcguccagcggcucugcuuguucgugugugugucguugcaggccuuauucaagcuuaccaugcagaucuacgagggcaagcugaccgccgaagggcucagauucggaauuguggcuagccgguuuaaccacgcccuggucgaccgccuuguugagggcgcgaucgaugcuauugugagacaugggggacgggaagaggacaucacacuggugcgcguccccggcuccugggaaauuccuguggccgccggggagcucgcuagaaaagaggauaucgacgccguuaucgcuauuggagugcugauccggggcgccacgccgcacuucgauuauauugcgucugaagucagcaagggccuugccgaccugucccucgagcugcgcaaacccaucaccuuuggggugauuacagcugauacccuggaacaagccaucgagagagcuggaacaaagcauggcaauaaagggugggaggccgcgcucucugccauugaaauggcuaaccuguucaagagccuucggggaggcuccgggggaucuggcggcagcgggggauccggcgggggacaguacaucaaggccaauagcaaauuuaucggcauuaccgagcuggggucuggauccggccucgacggcccuuaucagcccacaaccuucacgccucccaccgauuacuggauccugauuacaagcaacaccaaugggguuguguaugaaucuacaaacaauuccgacuuuuggaccgcugucaucgccguggagccucacgugaacccggucgaucgccaguacaauguuuucggagaaaacaagcaauuuaaugugagaaacgacagcgauaaauggaaguuccuugagauguuucgggggucuucccagaaugacuucuauaaccgcagaacgcugacaagcgacacccggcucgugggcauucugaaauacggaggccgcgucuggacauuucauggggagacccccagagccaccacagauuccucuaauacggcuaaccuggacggcaucagcaucaccauucacuccgaguucuacaucauuccucggagccaggaaucuaagugcaacgaauauaucaauaacggacucugaggacuagucccuguucccagagcccacuuuuuuuucuuuuuuugaaauaaaauagccugucuuucagaucucaaaggcucuuuucagagccaccaaaaaaaaaaaaaaaaaaaaaaaaaaaaaaaaaaaaaaaaaaaaaaaaaaaaaaaaaaaaaaaaaaaaaaaaaaaaaaaaaaaaaaaaaaaaaaaaaaaaa

SEQ ID NO: 1420 - RNA, 1319 nt, Artificial Sequence
  mRNA product Design a-1 (hSL-A100) comprising derived and/or modified sequence from RVA/Wa-VirWa/P[8]__ACR22783.1__LumSynt_P2_VP8*(65-223) (opt5)
aggagagucccgcagucggcguccagcggcucugcuuguucgugugugugucguugcaggccuuauucaagcuuaccaugcagaucuacgagggcaagcugaccgccgaagggcucagauucggaauuguggcuagccgguuuaaccacgcccuggucgaccgccuuguugagggcgcgaucgaugcuauugugagacaugggggacgggaagaggacaucacacuggugcgcguccccggcuccugggaaauuccuguggccgccggggagcucgcuagaaaagaggauaucgacgccguuaucgcuauuggagugcugauccggggcgccacgccgcacuucgauuauauugcgucugaagucagcaagggccuugccgaccugucccucgagcugcgcaaacccaucaccuuuggggugauuacagcugauacccuggaacaagccaucgagagagcuggaacaaagcauggcaauaaagggugggaggccgcgcucucugccauugaaauggcuaaccuguucaagagccuucggggaggcuccgggggaucuggcggcagcgggggauccggcgggggacaguacaucaaggccaauagcaaauuuaucggcauuaccgagcuggggucuggauccggccucgacggcccuuaucagcccacaaccuucacgccucccaacgauuacuggauccugauuaauagcaacaccaaugggguuguguaugaaucuacaaacaauuccgacuuuuggaccgcugucguggccaucgagccucacgugaacccggucgaucgccaguacacaauuuucggagaaagcaagcaauuuaauguuagaaacgacucuaauaaauggaaguuccuugagauguuucgguccagcucccagaacgaguucuauaaucgcagaacccugacgucugauacacggcucgugggcauccugaaauacgggggacgcguguggaccuuucauggcgaaacacccagagccaccaccgacagcuccagcacagcuaaccugaacaauaucucuauuacgauccacuccgaguucuacauuaucccucggagccaggaaucuaagugcaacgaguauauuaauaacgggcucugaggacuagucccuguucccagagcccacuuuuuuuucuuuuuuugaaauaaaauagccugucuuucagaucucaaaggcucuuuucagagccaccaaaaaaaaaaaaaaaaaaaaaaaaaaaaaaaaaaaaaaaaaaaaaaaaaaaaaaaaaaaaaaaaaaaaaaaaaaaaaaaaaaaaaaaaaaaaaaaaaaaaa

SEQ ID NO: 1421 - RNA, 1319 nt, Artificial Sequence
  mRNA product Design a-1 (hSL-A100) comprising derived and/or modified sequence from RVA/Wa/P[8]__AAA47290.1__LumSynt_P2_VP8*(65-223) (opt5)
aggagagucccgcagucggcguccagcggcucugcuuguucgugugugugucguugcaggccuuauucaagcuuaccaugcagaucuacgagggcaagcugaccgccgaagggcucagauucggaauuguggcuagccgguuuaaccacgcccuggucgaccgccuuguugagggcgcgaucgaugcuauugugagacaugggggacgggaagaggacaucacacuggugcgcguccccggcuccugggaaauuccuguggccgccggggagcucgcuagaaaagaggauaucgacgccguuaucgcuauuggagugcugauccggggcgccacgccgcacuucgauuauauugcgucugaagucagcaagggccuugccgaccugucccucgagcugcgcaaacccaucaccuuuggggugauuacagcugauacccuggaacaagccaucgagagagcuggaacaaagcauggcaauaaagggugggaggccgcgcucucugccauugaaauggcuaaccuguucaagagccuucggggaggcuccgggggaucuggcggcagcgggggauccggcgggggacaguacaucaaggccaauagcaaauuuaucggcauuaccgagcuggggucuggauccggccucgacggcccuuaucagcccacaaccuucacgccucccaacgauuacuggauccugauuaauagcaacaccaaugggguuguguaugaaucuacaaacaauuccgacuuuuggaccgcugucguggccaucgagccucacgugaacccggucgaucgccaguacacaauuuucggagaaagcaagcaauuuaauguuucuaacgacuccaauaaauggaaguuccuugagauguuuagaagcuccucucagaacgaguucuauaaucggcgcacccugacgagcgauacaagauuugugggcauccucaaauacgggggacggguguggaccuuccauggcgaaacaccccgcgccaccaccgacuccagcucuacagcuaaccugaacaauaucuccauuacgauccacagcgaguucuacauuaucccuagaucucaggaaagcaagugcaacgaguauauuaauaacgggcugugaggacuagucccuguucccagagcccacuuuuuuuucuuuuuuugaaauaaaauagccugucuuucagaucucaaaggcucuuuucagagccaccaaaaaaaaaaaaaaaaaaaaaaaaaaaaaaaaaaaaaaaaaaaaaaaaaaaaaaaaaaaaaaaaaaaaaaaaaaaaaaaaaaaaaaaaaaaaaaaaaaaaa

SEQ ID NO: 1422 - RNA, 1319 nt, Artificial Sequence; identical to SEQ ID NO: 1421
  mRNA product Design a-1 (hSL-A100) comprising derived and/or modified sequence from RVA/Wa/P[8]__AAA66953.1__LumSynt_P2_VP8*(65-223) (opt5)

SEQ ID NO: 1423 - RNA, 1391 nt, Artificial Sequence
  mRNA product Design a-1 (hSL-A100) comprising derived and/or modified sequence from RVA/BE1058/P[4]__AEX30665.1__LumSynt_P2_VP8*(41-223) (opt5)
aggagagucccgcagucggcguccagcggcucugcuuguucgugugugugucguugcaggccuuauucaagcuuaccaugcagaucuacgagggcaagcugaccgccgaagggcucagauucggaauuguggcuagccgguuuaaccacgcccuggucgaccgccuuguugagggcgcgaucgaugcuauugugagacaugggggacgggaagaggacaucacacuggugcgcguccccggcuccugggaaauuccuguggccgccggggagcucgcuagaaaagaggauaucgacgccguuaucgcuauuggagugcugauccggggcgccacgccgcacuucgauuauauugcgucugaagucagcaagggccuugccgaccugucccucgagcugcgcaaacccaucaccuuuggggugauuacagcugauacccuggaacaagccaucgagagagcuggaacaaagcauggcaauaaagggugggaggccgcgcucucugccauugaaauggcuaaccuguucaagagccuucggggaggcuccgggggaucuggcggcagcgggggauccggcgggggacaguacaucaaggccaauagcaaauuuaucggcauuaccgagcuggggucuggauccggcgcucagacacgcuaugccccuguuaacuggggccacggggaaaucaaugacagcaccacgguggagcccguccucgauggaccuuaccagcccaccacauucaagccuccgaacgacuauuggcugcuuauuucuuccaauaccgauggcgugguguacgaaagcacaaacaauucugacuuuuggaccgccgucaucgcuguugagccccaugugaaccaaacgaauagacaguaugugcuguucggggagaacaaacaguuuaauauugaaaacuccagcgauaaguggaaauucuuugagauguucaagggaaauucccagucugacuuuagcaaccggcgcacacucaccuccagcaacagacuggucggcaugcugaaguacgggggccggguguggacauuccacggagaaaccccucgcgcgaccacagacucuuccagcacggccgaucucaauaacaucucuaucauuauccacagcgaguucuacauuauccccagaucccaagaaucuaaaugcaaugaguauauuaacaauggccugugaggacuagucccuguucccagagcccacuuuuuuuucuuuuuuugaaauaaaauagccugucuuucagaucucaaaggcucuuuucagagccaccaaaaaaaaaaaaaaaaaaaaaaaaaaaaaaaaaaaaaaaaaaaaaaaaaaaaaaaaaaaaaaaaaaaaaaaaaaaaaaaaaaaaaaaaaaaaaaaaaaaaa

SEQ ID NO: 1424 - RNA, 1391 nt, Artificial Sequence
  mRNA product Design a-1 (hSL-A100) comprising derived and/or modified sequence from RVA/DS-1/P[4]__CAD62680.1__LumSynt_P2_VP8*(41-223) (opt5)
aggagagucccgcagucggcguccagcggcucugcuuguucgugugugugucguugcaggccuuauucaagcuuaccaugcagaucuacgagggcaagcugaccgccgaagggcucagauucggaauuguggcuagccgguuuaaccacgcccuggucgaccgccuuguugagggcgcgaucgaugcuauugugagacaugggggacgggaagaggacaucacacuggugcgcguccccggcuccugggaaauuccuguggccgccggggagcucgcuagaaaagaggauaucgacgccguuaucgcuauuggagugcugauccggggcgccacgccgcacuucgauuauauugcgucugaagucagcaagggccuugccgaccugucccucgagcugcgcaaacccaucaccuuuggggugauuacagcugauacccuggaacaagccaucgagagagcuggaacaaagcauggcaauaaagggugggaggccgcgcucucugccauugaaauggcuaaccuguucaagagccuucggggaggcuccgggggaucuggcggcagcgggggauccggcgggggacaguacaucaaggccaauagcaaauuuaucggcauuaccgagcuggggucuggauccggcgcucagacacgcuaugccccuguuaacuggggcagcugggaaaucaaugacucuaccacgguggagcccguccucgaugggccuuaccagcccaccacauucaagccuccgaacgacuauuggcugcuuauuuccagcaauaccaacggagugguguacgaaucuacaaauaacaaugauuuuuggaccgccgucuccagcguugagccccacgugucccaaacgaacagacaguauauccuguucggcgagaauaaacaguuuaacguggaaaauaacucugacaaguggaaauucuuugagacauucaccgggagcucccagggaaacuuuagcaaucggcgcacacucaccucuuccaacagacuggucggcaugcugaaguacgggggccggguguggaccuuccauggagaaacaccucgcgcuacgaccgauagcucuaauacagcggaccucaacaauauuagcaucaucauucacuccgaguucuacaucauucccagaucucaagaaagcaagugcaacgaguauaucaauaacggccugugaggacuagucccuguucccagagcccacuuuuuuuucuuuuuuugaaauaaaauagccugucuuucagaucucaaaggcucuuuucagagccaccaaaaaaaaaaaaaaaaaaaaaaaaaaaaaaaaaaaaaaaaaaaaaaaaaaaaaaaaaaaaaaaaaaaaaaaaaaaaaaaaaaaaaaaaaaaaaaaaaaaaa

SEQ ID NO: 1425 - RNA, 1391 nt, Artificial Sequence; identical to SEQ ID NO: 1424
  mRNA product Design a-1 (hSL-A100) comprising derived and/or modified sequence from RVA/DS-1/P[4]__ABV53252.1__LumSynt_P2_VP8*(41-223) (opt5)

SEQ ID NO: 1426 - RNA, 1391 nt, Artificial Sequence
  mRNA product Design a-1 (hSL-A100) comprising derived and/or modified sequence from RVA/F01322/P[6]__AFA51886.1__LumSynt_P2_VP8*(41-223) (opt5)
aggagagucccgcagucggcguccagcggcucugcuuguucgugugugugucguugcaggccuuauucaagcuuaccaugcagaucuacgagggcaagcugaccgccgaagggcucagauucggaauuguggcuagccgguuuaaccacgcccuggucgaccgccuuguugagggcgcgaucgaugcuauugugagacaugggggacgggaagaggacaucacacuggugcgcguccccggcuccugggaaauuccuguggccgccggggagcucgcuagaaaagaggauaucgacgccguuaucgcuauuggagugcugauccggggcgccacgccgcacuucgauuauauugcgucugaagucagcaagggccuugccgaccugucccucgagcugcgcaaacccaucaccuuuggggugauuacagcugauacccuggaacaagccaucgagagagcuggaacaaagcauggcaauaaagggugggaggccgcgcucucugccauugaaauggcuaaccuguucaagagccuucggggaggcuccgggggaucuggcggcagcgggggauccggcgggggacaguacaucaaggccaauagcaaauuuaucggcauuaccgagcuggggucuggauccggcgcucagacaaacuaugccccuguuaccuggagccacggcgaagugaaugacucuacgaccaucgagcccguccucgaugggccuuaccagcccacaaacuucaagccuccgaaugacuauuggauucugcuuaaccccaccaaucaacagguggugcuggaaggaacaaacaaaaccgauaucugggucgcccuccugcugguugagccuaaugugacgaaccagucccgccaguacacacucuuuggcgagaccaagcaaauuacaguggaaaauaacaccaauaaauggaaguucuuugagauguucagaagcucugucuccgcugaauuucagcauaagcggacccugacaagcgacacgaaacuugcgggguucaugaaguuuuauaacuccguguggaccuuccacggagagacacccaacgccaccacagauuacucuagcaccuccaaucuguucgaaguugagacggugauccacgucgaguuuuacaucauuccucgcagccaggaaucuaaaugcuccgaguauaucaacacaggccucugaggacuagucccuguucccagagcccacuuuuuuuucuuuuuuugaaauaaaauagccugucuuucagaucucaaaggcucuuuucagagccaccaaaaaaaaaaaaaaaaaaaaaaaaaaaaaaaaaaaaaaaaaaaaaaaaaaaaaaaaaaaaaaaaaaaaaaaaaaaaaaaaaaaaaaaaaaaaaaaaaaaaa

SEQ ID NO: 1427 - RNA, 1391 nt, Artificial Sequence
  mRNA product Design a-1 (hSL-A100) comprising derived and/or modified sequence from RVA/1076/P[6]__AAA47337.1__LumSynt_P2_VP8*(41-223) (opt5)
aggagagucccgcagucggcguccagcggcucugcuuguucgugugugugucguugcaggccuuauucaagcuuaccaugcagaucuacgagggcaagcugaccgccgaagggcucagauucggaauuguggcuagccgguuuaaccacgcccuggucgaccgccuuguugagggcgcgaucgaugcuauugugagacaugggggacgggaagaggacaucacacuggugcgcguccccggcuccugggaaauuccuguggccgccggggagcucgcuagaaaagaggauaucgacgccguuaucgcuauuggagugcugauccggggcgccacgccgcacuucgauuauauugcgucugaagucagcaagggccuugccgaccugucccucgagcugcgcaaacccaucaccuuuggggugauuacagcugauacccuggaacaagccaucgagagagcuggaacaaagcauggcaauaaagggugggaggccgcgcucucugccauugaaauggcuaaccuguucaagagccuucggggaggcuccgggggaucuggcggcagcgggggauccggcgggggacaguacaucaaggccaauagcaaauuuaucggcauuaccgagcuggggucuggauccggcgcucagacaaacuaugccccuguuaccuggagccacggcgaagugaaugacucuacgaccaucgagcccguccucgaugggccuuaccagcccacauccuucaagccuccgagcgacuauuggauucugcuuaaccccaccaaucaacagguggugcuggaaggaacaaacaaaaccgauaucugggucgcccuccugcugguugagccuaaugugacgaaccagucucgccaguacacacucuuuggcgagaccaagcaaauuacaguggaaaauaacaccaauaaauggaaguucuuugagauguucagauccagcgucuccgcugaauuucagcauaagcggacccugacaucugacacgaaacuugcgggguuccugaaguuuuauaacagcguguggaccuucuacggagagacaccccacgccaccacagauuacuccagcaccucuaaucucuccgaaguugagacggcuauccacguggaguucuauaucauuccucgcagccaggaaucuaaaugcaacgaguacaucaacacaggccugugaggacuagucccuguucccagagcccacuuuuuuuucuuuuuuugaaauaaaauagccugucuuucagaucucaaaggcucuuuucagagccaccaaaaaaaaaaaaaaaaaaaaaaaaaaaaaaaaaaaaaaaaaaaaaaaaaaaaaaaaaaaaaaaaaaaaaaaaaaaaaaaaaaaaaaaaaaaaaaaaaaaaa

SEQ ID NO: 1428 - RNA, 1391 nt, Artificial Sequence
  mRNA product Design a-1 (hSL-A100) comprising derived and/or modified sequence from RVA/BE1128/P[8]__AEX30671.1__LumSynt_P2_VP8*(41-223) (opt5)
aggagagucccgcagucggcguccagcggcucugcuuguucgugugugugucguugcaggccuuauucaagcuuaccaugcagaucuacgagggcaagcugaccgccgaagggcucagauucggaauuguggcuagccgguuuaaccacgcccuggucgaccgccuuguugagggcgcgaucgaugcuauugugagacaugggggacgggaagaggacaucacacuggugcgcguccccggcuccugggaaauuccuguggccgccggggagcucgcuagaaaagaggauaucgacgccguuaucgcuauuggagugcugauccggggcgccacgccgcacuucgauuauauugcgucugaagucagcaagggccuugccgaccugucccucgagcugcgcaaacccaucaccuuuggggugauuacagcugauacccuggaacaagccaucgagagagcuggaacaaagcauggcaauaaagggugggaggccgcgcucucugccauugaaauggcuaaccuguucaagagccuucggggaggcuccgggggaucuggcggcagcgggggauccggcgggggacaguacaucaaggccaauagcaaauuuaucggcauuaccgagcuggggucuggauccggcgcucagacacgcuaugccccuguuaacuggggccacggggaaaucaaugacagcaccacgguggagcccauucucgauggaccuuaccagcccaccacauucaccccuccgacagacuauuggauccugauuaccucuaacacgaauggcgucguguacgaauccacaaacaauagcgauuuuuggaccgccgugaucgcugucgagccccauguuaacccuguggacagacaauauaauguguucggggagaacaagcaguuuaauguccggaacgauucugacaaauggaaguuccuugaaauguuucgcggauccagccagaaugacuucuacaacagacggacacugaccuccgauacccgccucgugggcauccugaaauacgggggcagaguuuggacauuucacggagagacgccccgggcgaccacagacucuagcaacaccgccaaucuggauggcauuuccaucacaauucacagcgaguucuauaucauuccuagaucucaggaauccaagugcaacgaauacaucaauaacgggcucugaggacuagucccuguucccagagcccacuuuuuuuucuuuuuuugaaauaaaauagccugucuuucagaucucaaaggcucuuuucagagccaccaaaaaaaaaaaaaaaaaaaaaaaaaaaaaaaaaaaaaaaaaaaaaaaaaaaaaaaaaaaaaaaaaaaaaaaaaaaaaaaaaaaaaaaaaaaaaaaaaaaaa

SEQ ID NO: 1429 - RNA, 1391 nt, Artificial Sequence
  mRNA product Design a-1 (hSL-A100) comprising derived and/or modified sequence from RVA/Wa-VirWa/P[8]__ACR22783.1__LumSynt_P2_VP8*(41-223) (opt5)
aggagagucccgcagucggcguccagcggcucugcuuguucgugugugugucguugcaggccuuauucaagcuuaccaugcagaucuacgagggcaagcugaccgccgaagggcucagauucggaauuguggcuagccgguuuaaccacgcccuggucgaccgccuuguugagggcgcgaucgaugcuauugugagacaugggggacgggaagaggacaucacacuggugcgcguccccggcuccugggaaauuccuguggccgccggggagcucgcuagaaaagaggauaucgacgccguuaucgcuauuggagugcugauccggggcgccacgccgcacuucgauuauauugcgucugaagucagcaagggccuugccgaccugucccucgagcugcgcaaacccaucaccuuuggggugauuacagcugauacccuggaacaagccaucgagagagcuggaacaaagcauggcaauaaagggugggaggccgcgcucucugccauugaaauggcuaaccuguucaagagccuucggggaggcuccgggggaucuggcggcagcgggggauccggcgggggacaguacaucaaggccaauagcaaauuuaucggcauuaccgagcuggggucuggauccggcgcucagacacgcuaugccccuguuaacuggggccacggggaaaucaaugacagcaccacgguggagcccauucucgauggaccuuaccagcccaccacauucaccccuccgaacgacuauuggauccugauuaauucuaacacaaauggcgucguguacgaauccaccaacaauagcgauuuuuggacggccguggucgcuaucgagccccauguuaacccuguggacagacaauauacaaucuucggggagucuaagcaguuuaaugugcggaacgauuccaauaaauggaaguuccuugaaauguuucgcagcuccucucagaacgaguucuacaacagacggacccugacaagcgacacccgccucgucggcauucugaaauacggagggagaguguggaccuuucacggcgaaacaccccgggcgacgaccgacuccagcucuacagccaaucugaacaauaucuccauuaccauccacagcgaguucuauauuaucccuagaucucaggaaagcaagugcaacgaguacaucaauaacggacucugaggacuagucccuguucccagagcccacuuuuuuuucuuuuuuugaaauaaaauagccugucuuucagaucucaaaggcucuuuucagagccaccaaaaaaaaaaaaaaaaaaaaaaaaaaaaaaaaaaaaaaaaaaaaaaaaaaaaaaaaaaaaaaaaaaaaaaaaaaaaaaaaaaaaaaaaaaaaaaaaaaaaa

SEQ ID NO: 1430 - RNA, 1391 nt, Artificial Sequence
  mRNA product Design a-1 (hSL-A100) comprising derived and/or modified sequence from RVA/Wa/P[8]__AAA47290.1__LumSynt_P2_VP8*(41-223) (opt5)
aggagagucccgcagucggcguccagcggcucugcuuguucgugugugugucguugcaggccuuauucaagcuuaccaugcagaucuacgagggcaagcugaccgccgaagggcucagauucggaauuguggcuagccgguuuaaccacgcccuggucgaccgccuuguugagggcgcgaucgaugcuauugugagacaugggggacgggaagaggacaucacacuggugcgcguccccggcuccugggaaauuccuguggccgccggggagcucgcuagaaaagaggauaucgacgccguuaucgcuauuggagugcugauccggggcgccacgccgcacuucgauuauauugcgucugaagucagcaagggccuugccgaccugucccucgagcugcgcaaacccaucaccuuuggggugauuacagcugauacccuggaacaagccaucgagagagcuggaacaaagcauggcaauaaagggugggaggccgcgcucucugccauugaaauggcuaaccuguucaagagccuucggggaggcuccgggggaucuggcggcagcgggggauccggcgggggacaguacaucaaggccaauagcaaauuuaucggcauuaccgagcuggggucuggauccggcgcucagacacgcuaugccccuguuaacuggggccacggggaaaucaaugacagcaccacgguggagcccauucucgauggaccuuaccagcccaccacauucaccccuccgaacgacuauuggauccugauuaauucuaacacaaauggcgucguguacgaauccaccaacaauagcgauuuuuggacggccguggucgcuaucgagccccauguuaacccuguggacagacaauauacaaucuucggggagucuaagcaguuuaauguguccaacgauagcaauaaauggaaguuccuugaaauguuucgguccucuagccagaacgaguucuacaaccgcagaacccugacauccgacacccgguuugucggcauucucaaauacggagggcgcguguggaccuuccacggcgaaacacccagagcgacgaccgacucuagcuccacagccaaucugaacaauaucagcauuaccauccacucugaguucuauauuaucccucggagccaggaauccaagugcaacgaguacaucaauaacggacugugaggacuagucccuguucccagagcccacuuuuuuuucuuuuuuugaaauaaaauagccugucuuucagaucucaaaggcucuuuucagagccaccaaaaaaaaaaaaaaaaaaaaaaaaaaaaaaaaaaaaaaaaaaaaaaaaaaaaaaaaaaaaaaaaaaaaaaaaaaaaaaaaaaaaaaaaaaaaaaaaaaaaa

SEQ ID NO: 1431 - RNA, 1391 nt, Artificial Sequence
  mRNA product Design a-1 (hSL-A100) comprising derived and/or modified sequence from RVA/Wa/P[8]__AAA66953.1__LumSynt_P2_VP8*(41-223) (opt5)
aggagagucccgcagucggcguccagcggcucugcuuguucgugugugugucguugcaggccuuauucaagcuuaccaugcagaucuacgagggcaagcugaccgccgaagggcucagauucggaauuguggcuagccgguuuaaccacgcccuggucgaccgccuuguugagggcgcgaucgaugcuauugugagacaugggggacgggaagaggacaucacacuggugcgcguccccggcuccugggaaauuccuguggccgccggggagcucgcuagaaaagaggauaucgacgccguuaucgcuauuggagugcugauccggggcgccacgccgcacuucgauuauauugcgucugaagucagcaagggccuugccgaccugucccucgagcugcgcaaacccaucaccuuuggggugauuacagcugauacccuggaacaagccaucgagagagcuggaacaaagcauggcaauaaagggugggaggccgcgcucucugccauugaaauggcuaaccuguucaagagccuucggggaggcuccgggggaucuggcggcagcgggggauccggcgggggacaguacaucaaggccaauagcaaauuuaucggcauuaccgagcuggggucuggauccggcgcucagacacgcuaugccccuguuaacuggggccacggggaaaucaaugacagcaccacgguggagcccaugcucgauggaccuuaccagcccaccacauucaccccuccgaacgacuauuggauucugaucaauucuaacacaaauggcgucguguacgaauccaccaacaauagcgauuuuuggacggccguggucgcuauugagccccauguuaacccuguggacagacaauauacaaucuucggggagucuaagcaguuuaauguguccaacgauagcaauaaauggaaguuccuugaaauguuucgguccucuagccagaacgaguucuacaaccgcagaacccugacauccgacacccgguuugucggaauccucaaauacggcgggcgcguguggaccuuccacggcgaaacacccagagcgacgaccgacucuagcuccacagccaaucugaacaauauuagcaucaccauucacucugaguucuauaucauuccucggagccaggaauccaagugcaacgaguacaucaauaacggacugugaggacuagucccuguucccagagcccacuuuuuuuucuuuuuuugaaauaaaauagccugucuuucagaucucaaaggcucuuuucagagccaccaaaaaaaaaaaaaaaaaaaaaaaaaaaaaaaaaaaaaaaaaaaaaaaaaaaaaaaaaaaaaaaaaaaaaaaaaaaaaaaaaaaaaaaaaaaaaaaaaaaaa

SEQ ID NO: 1432 - RNA, 866 nt, Artificial Sequence
  mRNA product Design a-1 (hSL-A100) comprising derived and/or modified sequence from RVA/BE1058/P[4]__AEX30665.1__SP-IgE_P2_VP8*(65-223) (opt5)
aggagagucccgcagucggcguccagcggcucugcuuguucgugugugugucguugcaggccuuauucaagcuuaccauggacuggaccuggauccuguuccucguggccgcugccacaagaguccacagccaguacauuaaggcgaacuccaaauuuaucggcauuacggagcuggggucuggaagcggccuugaugggcccuaucaaccuaccacauucaagccgcccaaugacuacuggcugcucaucuccucuaacaccgauggaguuguguaugaaagcacaaauaacuccgacuuuuggaccgcugugauugccgucgagccucaugugaaucagacaaaccggcaguacguucuguucggcgaaaauaaacaguuuaacaucgaaaauucuagcgauaaguggaaauucuuugagauguucaaggggaacucccaaagcgacuuuucuaaucgcagaacccuuacguccagcaaccggcuggugggaaugcucaaguauggcggccgcgucuggaccuuccacggggagacacccagagccaccacagauucuuccagcaccgcugaccugaauaacaucucuauuaucauucauuccgaguuuuacaucauuccucggagccaggaauccaaaugcaaugaguauaucaacaacggacugugaggacuagucccuguucccagagcccacuuuuuuuucuuuuuuugaaauaaaauagccugucuuucagaucucaaaggcucuuuucagagccaccaaaaaaaaaaaaaaaaaaaaaaaaaaaaaaaaaaaaaaaaaaaaaaaaaaaaaaaaaaaaaaaaaaaaaaaaaaaaaaaaaaaaaaaaaaaaaaaaaaaaa

SEQ ID NO: 1433 - RNA, 866 nt, Artificial Sequence
  mRNA product Design a-1 (hSL-A100) comprising derived and/or modified sequence from RVA/DS-1/P[4]__CAD62680.1__SP-IgE_P2_VP8*(65-223) (opt5)
aggagagucccgcagucggcguccagcggcucugcuuguucgugugugugucguugcaggccuuauucaagcuuaccauggacuggaccuggauccuguuccucguggccgcugccacaagaguccacagccaguacauuaaggcgaacuccaaauuuaucggcauuacggagcuggggucuggaagcggccuugaugggcccuaucaaccuaccacauucaagccgcccaaugacuacuggcugcucaucuccucuaacaccaauggaguuguguaugaaagcacaaacaauaacgauuuuuggaccgcuguguccucugucgagccucaugugagccagacaaaucggcaguacauucuguucggcgaaaacaaacaguuuaauguugagaacaauuccgacaaguggaaauucuuugaaaccuucacggggagcucucaaggaaacuuuuccaaucgcagaacccuuacaagcucuaaccggcuggugggcaugcucaaguauggcgggcgcgucuggaccuuccacggagagacacccagagccaccacggauuccagcaauacagccgaccugaacaacaucucuaucauuauccauuccgaguuuuacauuaucccucggagccaggaauccaagugcaaugaguauauuaacaauggccugugaggacuagucccuguucccagagcccacuuuuuuuucuuuuuuugaaauaaaauagccugucuuucagaucucaaaggcucuuuucagagccaccaaaaaaaaaaaaaaaaaaaaaaaaaaaaaaaaaaaaaaaaaaaaaaaaaaaaaaaaaaaaaaaaaaaaaaaaaaaaaaaaaaaaaaaaaaaaaaaaaaaaa

SEQ ID NO: 1434 - RNA, 866 nt, Artificial Sequence; identical to SEQ ID NO: 1433
  mRNA product Design a-1 (hSL-A100) comprising derived and/or modified sequence from RVA/DS-1/P[4]__ABV53252.1__SP-IgE_P2_VP8*(65-223) (opt5)

SEQ ID NO: 1435 - RNA, 866 nt, Artificial Sequence
  mRNA product Design a-1 (hSL-A100) comprising derived and/or modified sequence from RVA/F01322/P[6]__AFA51886.1__SP-IgE_P2_VP8*(65-223) (opt5)
aggagagucccgcagucggcguccagcggcucugcuuguucgugugugugucguugcaggccuuauucaagcuuaccauggacuggaccuggauccuguuccucguggccgcugccacaagaguccacagccaguacauuaaggcgaacuccaaauuuaucggcauuacggagcuggggucuggaagcggccuugaugggcccuaucaaccuaccaauuucaagccgcccaacgacuacuggauccugcucaauccuacaaaccagcagguugugcuggaaggaaccaauaaaacagauauuuggguggcccuucugcucgucgagcccaacgugaccaaucagucccggcaauauacacuguuuggcgaaaccaagcagaucacgguugagaacaauaccaacaaauggaaguucuuugaaauguuccgcucuagcguguccgcugaguuucagcauaagagaacacugaccucugacacaaaacucgccggguucaugaaguuuuacaauagcgucuggaccuuccacggagagacgccuaacgcuacaaccgauuauuccagcacaucuaaucuguuugaaguggagaccguuauccauguggaguucuacauuaucccccggucccaggaaagcaaaugcucugaguauauuaacaccggccuuugaggacuagucccuguucccagagcccacuuuuuuuucuuuuuuugaaauaaaauagccugucuuucagaucucaaaggcucuuuucagagccaccaaaaaaaaaaaaaaaaaaaaaaaaaaaaaaaaaaaaaaaaaaaaaaaaaaaaaaaaaaaaaaaaaaaaaaaaaaaaaaaaaaaaaaaaaaaaaaaaaaaaa

SEQ ID NO: 1436 - RNA, 866 nt, Artificial Sequence
  mRNA product Design a-1 (hSL-A100) comprising derived and/or modified sequence from RVA/1076/P[6]__AAA47337.1__SP-IgE_P2_VP8*(65-223) (opt5)
aggagagucccgcagucggcguccagcggcucugcuuguucgugugugugucguugcaggccuuauucaagcuuaccauggacuggaccuggauccuguuccucguggccgcugccacaagaguccacagccaguacauuaaggcgaacuccaaauuuaucggcauuacggagcuggggucuggaagcggccuugaugggcccuaucaaccuaccuccuucaagccgcccucugacuacuggauccugcucaauccuacaaaccagcagguugugcuggaaggaaccaauaaaacagauauuuggguggcccuucugcucgucgagcccaacgugaccaaucagagccggcaauauacacuguuuggcgaaaccaagcagaucacgguugagaacaauaccaacaaauggaaguucuuugaaauguuccgcuccucugugagcgcugaguuucagcauaagagaacacugaccuccgacacaaaacucgccggguuccugaaguuuuacaauagcgucuggaccuucuauggagagacgccucacgcuacaaccgauuacucuuccacaagcaaccuuucugaaguggagaccgccauccauguugaauuuuauauuaucccccggucccaggagagcaaaugcaaugaguacauuaacaccggccugugaggacuagucccuguucccagagcccacuuuuuuuucuuuuuuugaaauaaaauagccugucuuucagaucucaaaggcucuuuucagagccaccaaaaaaaaaaaaaaaaaaaaaaaaaaaaaaaaaaaaaaaaaaaaaaaaaaaaaaaaaaaaaaaaaaaaaaaaaaaaaaaaaaaaaaaaaaaaaaaaaaaaa

SEQ ID NO: 1437 - RNA, 866 nt, Artificial Sequence
  mRNA product Design a-1 (hSL-A100) comprising derived and/or modified sequence from RVA/BE1128/P[8]__AEX30671.1__SP-IgE_P2_VP8*(65-223) (opt5)
aggagagucccgcagucggcguccagcggcucugcuuguucgugugugugucguugcaggccuuauucaagcuuaccauggacuggaccuggauccuguuccucguggccgcugccacaagaguccacagccaguacauuaaggcgaacuccaaauuuaucggcauuacggagcuggggucuggaagcggccuugaugggcccuaucaaccuaccacauucaccccgcccacagacuacuggauccugauuaccuccaauacaaacggaguuguguaugaaucuaccaauaacagcgauuuuuggacggcugugaucgccgucgagccucaugugaaucccguugaccggcaguacaacguguucggcgaaaauaagcaguuuaacguccgcaaugauuccgacaaauggaaguuccucgagauguuuagagggucuagccagaacgauuucuauaaucggcgcacccugacauccgacaccagacuugugggaauccugaaauacggcggccggguuuggacauuucacggggaaaccccucgcgccacgacagauagcucuaacaccgcuaaucucgacggaauuuccaucacaauucauagcgaguucuauaucauucccagaucucaagaguccaagugcaacgaauacaucaauaacggccugugaggacuagucccuguucccagagcccacuuuuuuuucuuuuuuugaaauaaaauagccugucuuucagaucucaaaggcucuuuucagagccaccaaaaaaaaaaaaaaaaaaaaaaaaaaaaaaaaaaaaaaaaaaaaaaaaaaaaaaaaaaaaaaaaaaaaaaaaaaaaaaaaaaaaaaaaaaaaaaaaaaaaa

SEQ ID NO: 1438 - RNA, 866 nt, Artificial Sequence
  mRNA product Design a-1 (hSL-A100) comprising derived and/or modified sequence from RVA/Wa-VirWa/P[8]__ACR22783.1__SP-IgE_P2_VP8*(65-223) (opt5)
aggagagucccgcagucggcguccagcggcucugcuuguucgugugugugucguugcaggccuuauucaagcuuaccauggacuggaccuggauccuguuccucguggccgcugccacaagaguccacagccaguacauuaaggcgaacuccaaauuuaucggcauuacggagcuggggucuggaagcggccuugaugggcccuaucaaccuaccacauucaccccgcccaaugacuacuggauccugauuaacuccaauacaaacggaguuguguaugaaucuaccaauaacagcgauuuuuggacagcuguggucgccaucgagccucaugugaaucccguugaccggcaguacaccaucuucggcgaauccaagcaguuuaacgugcgcaaugauucuaacaaauggaaguuccucgagauguuuagaagcuccagccagaaugaguucuauaaccggcgcacgcugaccucugacacaagacuugucgggauucugaaauacggaggccggguguggaccuuucacggcgaaacaccucgcgccaccacggauuccagcucuacagcuaaucucaacaauaucuccauuaccauccauagcgaguucuauauuauccccagaucucaagaauccaagugcaacgaguacauuaacaaugggcugugaggacuagucccuguucccagagcccacuuuuuuuucuuuuuuugaaauaaaauagccugucuuucagaucucaaaggcucuuuucagagccaccaaaaaaaaaaaaaaaaaaaaaaaaaaaaaaaaaaaaaaaaaaaaaaaaaaaaaaaaaaaaaaaaaaaaaaaaaaaaaaaaaaaaaaaaaaaaaaaaaaaaa

SEQ ID NO: 1439 - RNA, 866 nt, Artificial Sequence
  mRNA product Design a-1 (hSL-A100) comprising derived and/or modified sequence from RVA/Wa/P[8]__AAA47290.1__SP-IgE_P2_VP8*(65-223) (opt5)
aggagagucccgcagucggcguccagcggcucugcuuguucgugugugugucguugcaggccuuauucaagcuuaccauggacuggaccuggauccuguuccucguggccgcugccacaagaguccacagccaguacauuaaggcgaacuccaaauuuaucggcauuacggagcuggggucuggaagcggccuugaugggcccuaucaaccuaccacauucaccccgcccaaugacuacuggauccugauuaacuccaauacaaacggaguuguguaugaaucuaccaauaacagcgauuuuuggacagcuguggucgccaucgagccucaugugaaucccguugaccggcaguacaccaucuucggcgaauccaagcaguuuaacgugucuaaugauagcaacaaauggaaguuccucgagauguuucgcuccagcucucagaaugaguucuauaacagacggacgcugaccuccgacacacgcuuugucgggauucuuaaauacggaggcagaguguggaccuuccacggcgaaacaccucgggccaccacggauucuagcuccacagcuaaucugaacaauaucagcauuaccauccauucugaguuuuauauuaucccccgcucccaagaaagcaagugcaacgaguacauuaacaaugggcucugaggacuagucccuguucccagagcccacuuuuuuuucuuuuuuugaaauaaaauagccugucuuucagaucucaaaggcucuuuucagagccaccaaaaaaaaaaaaaaaaaaaaaaaaaaaaaaaaaaaaaaaaaaaaaaaaaaaaaaaaaaaaaaaaaaaaaaaaaaaaaaaaaaaaaaaaaaaaaaaaaaaaa

SEQ ID NO: 1440 - RNA, 866 nt, Artificial Sequence; identical to SEQ ID NO: 1439
  mRNA product Design a-1 (hSL-A100) comprising derived and/or modified sequence from RVA/Wa/P[8]__AAA66953.1__SP-IgE_P2_VP8*(65-223) (opt5)

SEQ ID NO: 1441 - RNA, 938 nt, Artificial Sequence
  mRNA product Design a-1 (hSL-A100) comprising derived and/or modified sequence from RVA/BE1058/P[4]__AEX30665.1__SP-IgE_P2_VP8*(41-223) (opt5)
aggagagucccgcagucggcguccagcggcucugcuuguucgugugugugucguugcaggccuuauucaagcuuaccauggacuggaccuggauccuguuccucguggccgcugccacaagaguccacagccaguacauuaaggcgaacuccaaauuuaucggcauuacggagcuggggucuggaagcggcgcucaaacccgguaugcccccguuaauugggggcauggagaaaucaacgauuccacaaccguggagccugugcuugacggcccguaccagcccacaaccuucaagccucccaaugauuauuggcugcucauuucuagcaacacagacggggucguguacgaauccaccaauaacucugauuuuuggacggccguuaucgcuguggagccucacgucaaucagaccaaccgccaguaugugcuguucggagaaaauaaacaauuuaacaucgagaauagcuccgacaaguggaaauucuuugagauguucaagggcaacagccagucugauuuuuccaauagacggacacuuaccagcucuaaccgccugguuggcaugcucaaguacgggggaagaguguggacauuccauggcgaaacgccccgggccaccacagacuccagcucuaccgcugaucugaauaacauuuccaucauuauccacagcgaguuuuauauuaucccucgcucccaggaaucuaaaugcaacgaguacauuaauaacgggcugugaggacuagucccuguucccagagcccacuuuuuuuucuuuuuuugaaauaaaauagccugucuuucagaucucaaaggcucuuuucagagccaccaaaaaaaaaaaaaaaaaaaaaaaaaaaaaaaaaaaaaaaaaaaaaaaaaaaaaaaaaaaaaaaaaaaaaaaaaaaaaaaaaaaaaaaaaaaaaaaaaaaaa

SEQ ID NO: 1442 - RNA, 938 nt, Artificial Sequence
  mRNA product Design a-1 (hSL-A100) comprising derived and/or modified sequence from RVA/DS-1/P[4]__CAD62680.1__SP-IgE_P2_VP8*(41-223) (opt5)
aggagagucccgcagucggcguccagcggcucugcuuguucgugugugugucguugcaggccuuauucaagcuuaccauggacuggaccuggauccuguuccucguggccgcugccacaagaguccacagccaguacauuaaggcgaacuccaaauuuaucggcauuacggagcuggggucuggaagcggcgcucaaacccgguaugcccccguuaauuggggguccugggaaaucaacgauucuacaaccguggagccugugcuugacggaccguaccagcccacaaccuucaagccucccaaugauuauuggcugcucauuagcuccaacacaaauggcgucguguacgaaucuaccaacaauaacgacuuuuggacggccguuagcuccguggagccucaugucagccagaccaaucgccaguauauccuguucggggaaaacaaacaauuuaauguggagaacaauucugauaaguggaaauucuuugagacauucaccggauccagccagggcaacuuuucuaauagacggacacuuaccuccagcaaccgccugguuggcaugcucaaguacgggggaagaguguggacguuccacggcgaaacaccccgggcuaccacagacucuuccaacaccgccgaucugaauaacaucagcauuaucauucauuccgaguuuuauaucauuccucgcucucaggaaagcaagugcaaugaguacaucaacaaugggcugugaggacuagucccuguucccagagcccacuuuuuuuucuuuuuuugaaauaaaauagccugucuuucagaucucaaaggcucuuuucagagccaccaaaaaaaaaaaaaaaaaaaaaaaaaaaaaaaaaaaaaaaaaaaaaaaaaaaaaaaaaaaaaaaaaaaaaaaaaaaaaaaaaaaaaaaaaaaaaaaaaaaaa

SEQ ID NO: 1443 - RNA, 938 nt, Artificial Sequence; identical to SEQ ID NO: 1442
  mRNA product Design a-1 (hSL-A100) comprising derived and/or modified sequence from RVA/DS-1/P[4]__ABV53252.1__SP-IgE_P2_VP8*(41-223) (opt5)

SEQ ID NO: 1444 - RNA, 938 nt, Artificial Sequence
  mRNA product Design a-1 (hSL-A100) comprising derived and/or modified sequence from RVA/F01322/P[6]__AFA51886.1__SP-IgE_P2_VP8*(41-223) (opt5)
aggagagucccgcagucggcguccagcggcucugcuuguucgugugugugucguugcaggccuuauucaagcuuaccauggacuggaccuggauccuguuccucguggccgcugccacaagaguccacagccaguacauuaaggcgaacuccaaauuuaucggcauuacggagcuggggucuggaagcggcgcucaaaccaauuaugcccccguuacauggucccauggggaagugaacgauucuaccacaaucgagccugugcuugacggaccguaccagcccaccaauuucaagccucccaacgauuauuggauucugcucaauccuacaaaccagcaggucgugcuggaaggcaccaauaaaacggacaucuggguugcccuucugcucguggagcccaacgucaccaaucaaagccggcaguacacacuguuuggggaaaccaagcagaucacaguggagaacaauaccaacaaauggaaguucuuugagauguuccgcuccucuguuagcgcugaauuucagcacaagagaacgcugacauccgauaccaaacucgccggauucaugaaguuuuauaauagcguguggacauuccauggcgagaccccuaacgcuaccacagacuacucuuccacgagcaaucuguuugaagucgagaccgugauucacguggaguucuauaucauuccgcggucucaagaauccaaaugcagcgaguacaucaacacaggccuuugaggacuagucccuguucccagagcccacuuuuuuuucuuuuuuugaaauaaaauagccugucuuucagaucucaaaggcucuuuucagagccaccaaaaaaaaaaaaaaaaaaaaaaaaaaaaaaaaaaaaaaaaaaaaaaaaaaaaaaaaaaaaaaaaaaaaaaaaaaaaaaaaaaaaaaaaaaaaaaaaaaaaa

SEQ ID NO: 1445 - RNA, 938 nt, Artificial Sequence
  mRNA product Design a-1 (hSL-A100) comprising derived and/or modified sequence from RVA/1076/P[6]__AAA47337.1__SP-IgE_P2_VP8*(41-223) (opt5)
aggagagucccgcagucggcguccagcggcucugcuuguucgugugugugucguugcaggccuuauucaagcuuaccauggacuggaccuggauccuguuccucguggccgcugccacaagaguccacagccaguacauuaaggcgaacuccaaauuuaucggcauuacggagcuggggucuggaagcggcgcucaaaccaauuaugcccccguuacauggucccauggggaagugaacgauucuaccacaaucgagccugugcuugacggaccguaccagcccaccagcuucaagccucccuccgauuauuggauucugcucaauccuacaaaccagcaggucgugcuggaaggcaccaauaaaacggacaucuggguugcccuucugcucguggagcccaacgucaccaaucaaucucggcaguacacacuguuuggggaaaccaagcagaucacaguggagaacaauaccaacaaauggaaguucuuugagauguuccgcagcuccguuagcgcugaauuucagcacaagagaacgcugacaucugauaccaaacucgccggauuccugaaguuuuauaauuccguguggacauucuacggcgagaccccucaugcuaccacagacuauagcucuacguccaaccuuagcgaagucgagaccgccauucacguggaguuuuacaucauuccgcggucucaagaauccaaaugcaaugaguacaucaacacaggccugugaggacuagucccuguucccagagcccacuuuuuuuucuuuuuuugaaauaaaauagccugucuuucagaucucaaaggcucuuuucagagccaccaaaaaaaaaaaaaaaaaaaaaaaaaaaaaaaaaaaaaaaaaaaaaaaaaaaaaaaaaaaaaaaaaaaaaaaaaaaaaaaaaaaaaaaaaaaaaaaaaaaaa

SEQ ID NO: 1446 - RNA, 938 nt, Artificial Sequence
  mRNA product Design a-1 (hSL-A100) comprising derived and/or modified sequence from RVA/BE1128/P[8]__AEX30671.1__SP-IgE_P2_VP8*(41-223) (opt5)
aggagagucccgcagucggcguccagcggcucugcuuguucgugugugugucguugcaggccuuauucaagcuuaccauggacuggaccuggauccuguuccucguggccgcugccacaagaguccacagccaguacauuaaggcgaacuccaaauuuaucggcauuacggagcuggggucuggaagcggcgcucaaacccgguaugcccccguuaauugggggcauggagaaaucaacgauuccacaaccguggagccuauucuugacggcccguaccagcccacaaccuucacaccucccaccgauuauuggauccugaucacgucuaauaccaacgggguggucuacgaaagcacaaauaacuccgacuuuuggaccgccgugauugcuguugagccucacgugaaucccgucgaucgccaguauaacguguucggagaaaauaagcaguuuaacguuagaaaugacucugauaaauggaaguuccucgagauguuucggggcagcucccaaaacgacuucuacaaucgcagaacacugaccagcgauacgcggcuugugggcauccugaaauaugggggacgcgucuggacauuucauggcgagaccccuagagccacaaccgacucuuccaacaccgcuaaucucgaugggauuagcaucacaauucacucugaguucuacaucauuccgcggucccaggaaagcaagugcaacgaauacaucaacaauggacugugaggacuagucccuguucccagagcccacuuuuuuuucuuuuuuugaaauaaaauagccugucuuucagaucucaaaggcucuuuucagagccaccaaaaaaaaaaaaaaaaaaaaaaaaaaaaaaaaaaaaaaaaaaaaaaaaaaaaaaaaaaaaaaaaaaaaaaaaaaaaaaaaaaaaaaaaaaaaaaaaaaaaa

SEQ ID NO: 1447 - RNA, 938 nt, Artificial Sequence
  mRNA product Design a-1 (hSL-A100) comprising derived and/or modified sequence from RVA/Wa-VirWa/P[8]__ACR22783.1__SP-IgE_P2_VP8*(41-223) (opt5)
aggagagucccgcagucggcguccagcggcucugcuuguucgugugugugucguugcaggccuuauucaagcuuaccauggacuggaccuggauccuguuccucguggccgcugccacaagaguccacagccaguacauuaaggcgaacuccaaauuuaucggcauuacggagcuggggucuggaagcggcgcucaaacccgguaugcccccguuaauugggggcauggagaaaucaacgauuccacaaccguggagccuauucuugacggcccguaccagcccacaaccuucacaccucccaaugauuauuggauccugaucaacucuaauaccaacgggguggucuacgaaagcacgaauaacuccgacuuuuggaccgccgugguugcuauugagccucacgugaaucccgucgaucgccaguauacaaucuucggagaaucuaagcaguuuaacgugagaaaugacagcaacaaauggaaguuccucgagauguuucgguccagcucucaaaaugaguucuacaaccgcagaacccugacauccgauacccggcuuguuggcauucugaaauauggcgggcgcguguggacguuucauggagaaacaccuagagccaccacagacucuagcuccaccgcuaaucucaacaacaucagcauuaccauccacucugaguucuacauuaucccgcggucccaggaaagcaagugcaaugaguacaucaacaauggccugugaggacuagucccuguucccagagcccacuuuuuuuucuuuuuuugaaauaaaauagccugucuuucagaucucaaaggcucuuuucagagccaccaaaaaaaaaaaaaaaaaaaaaaaaaaaaaaaaaaaaaaaaaaaaaaaaaaaaaaaaaaaaaaaaaaaaaaaaaaaaaaaaaaaaaaaaaaaaaaaaaaaaa

SEQ ID NO: 1448 - RNA, 938 nt, Artificial Sequence
  mRNA product Design a-1 (hSL-A100) comprising derived and/or modified sequence from RVA/Wa/P[8]__AAA47290.1__SP-IgE_P2_VP8*(41-223) (opt5)
aggagagucccgcagucggcguccagcggcucugcuuguucgugugugugucguugcaggccuuauucaagcuuaccauggacuggaccuggauccuguuccucguggccgcugccacaagaguccacagccaguacauuaaggcgaacuccaaauuuaucggcauuacggagcuggggucuggaagcggcgcucaaacccgguaugcccccguuaauugggggcauggagaaaucaacgauuccacaaccguggagccuauucuugacggcccguaccagcccacaaccuucacaccucccaaugauuauuggauccugaucaacucuaauaccaacgggguggucuacgaaagcacgaauaacuccgacuuuuggaccgccgugguugcuauugagccucacgugaaucccgucgaucgccaguauacaaucuucggagaaucuaagcaguuuaacgugagcaaugacuccaacaaauggaaguuccucgagauguuuagaucuagcucccaaaaugaguucuacaaccggcgcacccugacaagcgauaccagauuuguuggcauucuuaaauauggcgggcggguguggacguuccauggagaaacaccucgcgccaccacagacucuuccagcaccgcuaaucugaacaacaucucuauuaccauccacuccgaguuuuacauuaucccgagaagccaggaauccaagugcaaugaguacaucaacaauggccucugaggacuagucccuguucccagagcccacuuuuuuuucuuuuuuugaaauaaaauagccugucuuucagaucucaaaggcucuuuucagagccaccaaaaaaaaaaaaaaaaaaaaaaaaaaaaaaaaaaaaaaaaaaaaaaaaaaaaaaaaaaaaaaaaaaaaaaaaaaaaaaaaaaaaaaaaaaaaaaaaaaaaa

SEQ ID NO: 1449 - RNA, 938 nt, Artificial Sequence
  mRNA product Design a-1 (hSL-A100) comprising derived and/or modified sequence from RVA/Wa/P[8]__AAA66953.1__SP-IgE_P2_VP8*(41-223) (opt5)
aggagagucccgcagucggcguccagcggcucugcuuguucgugugugugucguugcaggccuuauucaagcuuaccauggacuggaccuggauccuguuccucguggccgcugccacaagaguccacagccaguacauuaaggcgaacuccaaauuuaucggcauuacggagcuggggucuggaagcggcgcucaaacccgguaugcccccguuaauugggggcauggagaaaucaacgauuccacaaccguggagccuaugcuugacggcccguaccagcccacaaccuucacaccucccaaugauuauuggauucugaucaacucuaauaccaacgggguggucuacgaaagcacgaauaacuccgacuuuuggaccgccgugguugcuaucgagccucacgugaaucccgucgaucgccaguauacaauuuucggagaaucuaagcaguuuaacgugagcaaugacuccaacaaauggaaguuccucgagauguuuagaucuagcucccaaaaugaguucuacaaccggcgcacccugacaagcgauaccagauuuguuggcauccuuaaauauggcgggcggguguggacguuccauggagaaacaccucgcgccaccacagacucuuccagcaccgcuaaucugaacaacauuucuaucaccauucacuccgaguuuuacaucauuccgagaagccaggaauccaagugcaaugaguacaucaacaauggccucugaggacuagucccuguucccagagcccacuuuuuuuucuuuuuuugaaauaaaauagccugucuuucagaucucaaaggcucuuuucagagccaccaaaaaaaaaaaaaaaaaaaaaaaaaaaaaaaaaaaaaaaaaaaaaaaaaaaaaaaaaaaaaaaaaaaaaaaaaaaaaaaaaaaaaaaaaaaaaaaaaaaaa

SEQ ID NO: 1450 - RNA, 756 nt, Artificial Sequence
  mRNA product Design i-3 (hSL-A100) comprising derived and/or modified sequence from RVA/BE1058/P[4]__AEX30665.1__P2_VP8*(65-223) (opt1)
aggagaaagcuuaccaugcaguacaucaaggccaacagcaaguucaucggcaucaccgagcugggcagcggguccggccucgacggccccuaccagcccacgaccuucaagccgcccaacgacuacuggcugcugaucuccagcaacaccgacgggguggucuacgaguccaccaacaacagcgacuucuggacggccgugaucgccguggagccccacgucaaccagaccaaccgccaguacgugcuguucggcgagaacaagcaguucaacaucgagaacuccagcgacaaguggaaguucuucgagauguucaagggcaacucccagagcgacuucuccaaccggcgcacccugaccagcuccaaccggcugguggggaugcucaaguacggcgggcgcgucuggacguuccacggcgagaccccgcgggccaccaccgacagcuccagcacggccgaccugaacaacaucuccaucaucauccacagcgaguucuacaucaucccccgcagccaggaguccaagugcaacgaguacaucaacaacgggcugugaggacuaguuauaagacugacuagcccgaugggccucccaacgggcccuccuccccuccuugcaccgagauuaaucaaaggcucuuuucagagccaccaaaaaaaaaaaaaaaaaaaaaaaaaaaaaaaaaaaaaaaaaaaaaaaaaaaaaaaaaaaaaaaaaaaaaaaaaaaaaaaaaaaaaaaaaaaaaaaaaaaaa

SEQ ID NO: 1451 - RNA, 756 nt, Artificial Sequence
  mRNA product Design i-3 (hSL-A100) comprising derived and/or modified sequence from RVA/DS-1/P[4]__CAD62680.1__P2_VP8*(65-223) (opt1)
aggagaaagcuuaccaugcaguacaucaaggccaacagcaaguucaucggcaucaccgagcugggcagcggguccggccucgacgggcccuaccagccgacgaccuucaagccgcccaacgacuacuggcugcugaucuccagcaacaccaacggcguggucuacgaguccaccaacaacaacgacuucuggacggccgugagcuccguggagccccacgucagccagaccaaccgccaguacauccucuucggggagaacaagcaguucaacguggagaacaacuccgacaaguggaaguucuucgagaccuucaccggcagcucccagggcaacuucagcaaccggcgcacgcugaccuccagcaaccggcugguggggaugcucaaguacggcgggcgcgucuggaccuuccacggcgagacgccccgggccaccaccgacuccagcaacaccgccgaccugaacaacaucagcaucaucauccacuccgaguucuacaucaucccccgcagccaggaguccaagugcaacgaguacaucaacaacgggcugugaggacuaguuauaagacugacuagcccgaugggccucccaacgggcccuccuccccuccuugcaccgagauuaaucaaaggcucuuuucagagccaccaaaaaaaaaaaaaaaaaaaaaaaaaaaaaaaaaaaaaaaaaaaaaaaaaaaaaaaaaaaaaaaaaaaaaaaaaaaaaaaaaaaaaaaaaaaaaaaaaaaaa

SEQ ID NO: 1452 - RNA, 756 nt, Artificial Sequence; identical to SEQ ID NO: 1451
  mRNA product Design i-3 (hSL-A100) comprising derived and/or modified sequence from RVA/DS-1/P[4]__ABV53252.1__P2_VP8*(65-223) (opt1)

SEQ ID NO: 1453 - RNA, 756 nt, Artificial Sequence
  mRNA product Design i-3 (hSL-A100) comprising derived and/or modified sequence from RVA/F01322/P[6]__AFA51886.1__P2_VP8*(65-223) (opt1)
aggagaaagcuuaccaugcaguacaucaaggccaacagcaaguucaucggcaucaccgagcugggcagcggguccggccucgacgggcccuaccagccgaccaacuucaagccgcccaacgacuacuggauccugcugaaccccaccaaccagcagguggugcucgagggcacgaacaagaccgacaucugggucgcccugcugcucguggagccgaacgugaccaaccagagccggcaguacacccuguucggggagacgaagcagaucaccgucgagaacaacaccaacaaguggaaguucuucgagauguuccgcuccagcguguccgccgaguuccagcacaagcggacccugacgagcgacaccaagcucgccggcuucaugaaguucuacaacuccguguggaccuuccacggcgagacccccaacgccacgaccgacuacagcuccaccagcaaccuguucgaggucgagaccgugauccacguggaguucuacaucaucccccgcucccaggagagcaagugcuccgaguacaucaacacggggcugugaggacuaguuauaagacugacuagcccgaugggccucccaacgggcccuccuccccuccuugcaccgagauuaaucaaaggcucuuuucagagccaccaaaaaaaaaaaaaaaaaaaaaaaaaaaaaaaaaaaaaaaaaaaaaaaaaaaaaaaaaaaaaaaaaaaaaaaaaaaaaaaaaaaaaaaaaaaaaaaaaaaaa

SEQ ID NO: 1454 - RNA, 756 nt, Artificial Sequence
  mRNA product Design i-3 (hSL-A100) comprising derived and/or modified sequence from RVA/1076/P[6]__AAA47337.1__P2_VP8*(65-223) (opt1)
aggagaaagcuuaccaugcaguacaucaaggccaacagcaaguucaucggcaucaccgagcugggcagcggguccggccucgacgggcccuaccagccgaccuccuucaagccgcccagcgacuacuggauccugcugaaccccaccaaccagcaggucgugcucgagggcacgaacaagaccgacaucuggguggcccugcugcucguggagcccaacgugaccaaccagucccggcaguacacccuguucggggagacgaagcagaucaccgucgagaacaacaccaacaaguggaaguucuucgagauguuccgcagcuccgugagcgccgaguuccagcacaagcggacccugacguccgacaccaagcucgccggcuuccugaaguucuacaacagcguguggaccuucuacggcgagacgccccacgccaccaccgacuacuccagcaccuccaaccugagcgaggucgagaccgcgauccacguggaguucuacaucaucccccgcucccaggagagcaagugcaacgaguacaucaacacggggcugugaggacuaguuauaagacugacuagcccgaugggccucccaacgggcccuccuccccuccuugcaccgagauuaaucaaaggcucuuuucagagccaccaaaaaaaaaaaaaaaaaaaaaaaaaaaaaaaaaaaaaaaaaaaaaaaaaaaaaaaaaaaaaaaaaaaaaaaaaaaaaaaaaaaaaaaaaaaaaaaaaaaaa

SEQ ID NO: 1455 - RNA, 756 nt, Artificial Sequence
  mRNA product Design i-3 (hSL-A100) comprising derived and/or modified sequence from RVA/BE1128/P[8]__AEX30671.1__P2_VP8*(65-223) (opt1)
aggagaaagcuuaccaugcaguacaucaaggccaacagcaaguucaucggcaucaccgagcugggcagcggguccggccucgacggcccguaccagccgacgaccuucaccccgcccaccgacuacuggauccugaucacguccaacaccaacggggugguguacgagagcaccaacaacuccgacuucuggaccgccgucaucgccguggagccccacgugaacccggucgaccgccaguacaacguguucggcgagaacaagcaguucaacgugcggaacgacagcgacaaguggaaguuccuggagauguuccgcggcuccagccagaacgacuucuacaaccggcgcacgcucaccuccgacacccggcuggucgggauccugaaguacggcgggcgcguguggaccuuccacggcgagacgccccgggccaccaccgacagcuccaacaccgccaaccucgacgggaucagcaucacgauccacuccgaguucuacaucaucccccgcagccaggaguccaagugcaacgaguacaucaacaacggccugugaggacuaguuauaagacugacuagcccgaugggccucccaacgggcccuccuccccuccuugcaccgagauuaaucaaaggcucuuuucagagccaccaaaaaaaaaaaaaaaaaaaaaaaaaaaaaaaaaaaaaaaaaaaaaaaaaaaaaaaaaaaaaaaaaaaaaaaaaaaaaaaaaaaaaaaaaaaaaaaaaaaaa

SEQ ID NO: 1456 - RNA, 756 nt, Artificial Sequence
  mRNA product Design i-3 (hSL-A100) comprising derived and/or modified sequence from RVA/Wa-VirWa/P[8]__ACR22783.1__P2_VP8*(65-223) (opt1)
aggagaaagcuuaccaugcaguacaucaaggccaacagcaaguucaucggcaucaccgagcugggcagcggguccggccucgacgggcccuaccagccgacgaccuucaccccgcccaacgacuacuggauccugaucaacagcaacaccaacggcgucguguacgaguccacgaacaacagcgacuucuggaccgccguggucgccaucgagccccacgugaacccgguggaccgccaguacaccaucuucggggaguccaagcaguucaacguccggaacgacagcaacaaguggaaguuccuggagauguuccgcuccagcucccagaacgaguucuacaaccggcgcacccucacgagcgacacccggcuggugggcauccugaaguacggcgggcgcguguggaccuuccacggcgagaccccgcgggccacgaccgacuccagcuccaccgccaaccucaacaacaucagcaucaccauccacuccgaguucuacaucaucccccgcagccaggagagcaagugcaacgaguacaucaacaacgggcugugaggacuaguuauaagacugacuagcccgaugggccucccaacgggcccuccuccccuccuugcaccgagauuaaucaaaggcucuuuucagagccaccaaaaaaaaaaaaaaaaaaaaaaaaaaaaaaaaaaaaaaaaaaaaaaaaaaaaaaaaaaaaaaaaaaaaaaaaaaaaaaaaaaaaaaaaaaaaaaaaaaaaa

SEQ ID NO: 1457 - RNA, 756 nt, Artificial Sequence
  mRNA product Design i-3 (hSL-A100) comprising derived and/or modified sequence from RVA/Wa/P[8]__AAA47290.1__P2_VP8*(65-223) (opt1)
aggagaaagcuuaccaugcaguacaucaaggccaacagcaaguucaucggcaucaccgagcugggcagcggguccggccucgacgggcccuaccagccgacgaccuucaccccgcccaacgacuacuggauccugaucaacagcaacaccaacggcgucguguacgaguccacgaacaacagcgacuucuggaccgccguggucgccaucgagccccacgugaaccccguggaccgccaguacaccaucuucggggaguccaagcaguucaacgucagcaacgacuccaacaaguggaaguuccuggagauguuccggagcuccagccagaacgaguucuacaaccgccggacccucacguccgacacccgcuucgugggcauccugaaguacggcgggcggguguggaccuuccacggcgagacgccccgcgccaccaccgacagcuccagcaccgccaaccugaacaacaucuccaucaccauccacagcgaguucuacaucaucccccggagccaggaguccaagugcaacgaguacaucaacaacgggcugugaggacuaguuauaagacugacuagcccgaugggccucccaacgggcccuccuccccuccuugcaccgagauuaaucaaaggcucuuuucagagccaccaaaaaaaaaaaaaaaaaaaaaaaaaaaaaaaaaaaaaaaaaaaaaaaaaaaaaaaaaaaaaaaaaaaaaaaaaaaaaaaaaaaaaaaaaaaaaaaaaaaaa

SEQ ID NO: 1458 - RNA, 756 nt, Artificial Sequence; identical to SEQ ID NO: 1457
  mRNA product Design i-3 (hSL-A100) comprising derived and/or modified sequence from RVA/Wa/P[8]__AAA66953.1__P2_VP8*(65-223) (opt1)

SEQ ID NO: 1459 - RNA, 828 nt, Artificial Sequence
  mRNA product Design i-3 (hSL-A100) comprising derived and/or modified sequence from RVA/BE1058/P[4]__AEX30665.1__P2_VP8*(41-223) (opt1)
aggagaaagcuuaccaugcaguacaucaaggccaacagcaaguucaucggcaucaccgagcugggcagcggguccggcgcccagacccgguacgcgcccgugaacuggggccacggggagaucaacgacagcaccaccgucgagcccgugcucgacggccccuaccagcccacgaccuucaagccgcccaacgacuacuggcugcugaucuccagcaacaccgacgggguggucuacgaguccaccaacaacagcgacuucuggacggccgugaucgccguggagccccacgucaaccagaccaaccgccaguacgugcuguucggcgagaacaagcaguucaacaucgagaacuccagcgacaaguggaaguucuucgagauguucaagggcaacucccagagcgacuucuccaaccggcgcacccugaccagcuccaaccggcugguggggaugcucaaguacggcgggcgcgucuggacguuccacggcgagaccccgcgggccaccaccgacagcuccagcacggccgaccugaacaacaucuccaucaucauccacagcgaguucuacaucaucccccgcagccaggaguccaagugcaacgaguacaucaacaacgggcugugaggacuaguuauaagacugacuagcccgaugggccucccaacgggcccuccuccccuccuugcaccgagauuaaucaaaggcucuuuucagagccaccaaaaaaaaaaaaaaaaaaaaaaaaaaaaaaaaaaaaaaaaaaaaaaaaaaaaaaaaaaaaaaaaaaaaaaaaaaaaaaaaaaaaaaaaaaaaaaaaaaaaa

SEQ ID NO: 1460 - RNA, 828 nt, Artificial Sequence
  mRNA product Design i-3 (hSL-A100) comprising derived and/or modified sequence from RVA/DS-1/P[4]__CAD62680.1__P2_VP8*(41-223) (opt1)
aggagaaagcuuaccaugcaguacaucaaggccaacagcaaguucaucggcaucaccgagcugggcagcggguccggcgcccagacccgguacgcgcccgugaacuggggcuccugggagaucaacgacagcaccaccgucgagcccgugcucgacgggcccuaccagccgacgaccuucaagccgcccaacgacuacuggcugcugaucuccagcaacaccaacggcguggucuacgaguccaccaacaacaacgacuucuggacggccgugagcuccguggagccccacgucagccagaccaaccgccaguacauccucuucggggagaacaagcaguucaacguggagaacaacuccgacaaguggaaguucuucgagaccuucaccggcagcucccagggcaacuucagcaaccggcgcacgcugaccuccagcaaccggcugguggggaugcucaaguacggcgggcgcgucuggaccuuccacggcgagacgccccgggccaccaccgacuccagcaacaccgccgaccugaacaacaucagcaucaucauccacuccgaguucuacaucaucccccgcagccaggaguccaagugcaacgaguacaucaacaacgggcugugaggacuaguuauaagacugacuagcccgaugggccucccaacgggcccuccuccccuccuugcaccgagauuaaucaaaggcucuuuucagagccaccaaaaaaaaaaaaaaaaaaaaaaaaaaaaaaaaaaaaaaaaaaaaaaaaaaaaaaaaaaaaaaaaaaaaaaaaaaaaaaaaaaaaaaaaaaaaaaaaaaaaa

SEQ ID NO: 1461 - RNA, 828 nt, Artificial Sequence; identical to SEQ ID NO: 1460
  mRNA product Design i-3 (hSL-A100) comprising derived and/or modified sequence from RVA/DS-1/P[4]__ABV53252.1__P2_VP8*(41-223) (opt1)

SEQ ID NO: 1462 - RNA, 828 nt, Artificial Sequence
  mRNA product Design i-3 (hSL-A100) comprising derived and/or modified sequence from RVA/F01322/P[6]__AFA51886.1__P2_VP8*(41-223) (opt1)
aggagaaagcuuaccaugcaguacaucaaggccaacagcaaguucaucggcaucaccgagcugggcagcggguccggcgcccagaccaacuacgcgcccgugaccuggagccacggcgaggugaacgacuccacgaccaucgagcccguccucgacgggcccuaccagccgaccaacuucaagccgcccaacgacuacuggauccugcugaaccccaccaaccagcagguggugcucgagggcacgaacaagaccgacaucugggucgcccugcugcucguggagccgaacgugaccaaccagagccggcaguacacccuguucggggagacgaagcagaucaccgucgagaacaacaccaacaaguggaaguucuucgagauguuccgcuccagcguguccgccgaguuccagcacaagcggacccugacgagcgacaccaagcucgccggcuucaugaaguucuacaacuccguguggaccuuccacggcgagacccccaacgccacgaccgacuacagcuccaccagcaaccuguucgaggucgagaccgugauccacguggaguucuacaucaucccccgcucccaggagagcaagugcuccgaguacaucaacacggggcugugaggacuaguuauaagacugacuagcccgaugggccucccaacgggcccuccuccccuccuugcaccgagauuaaucaaaggcucuuuucagagccaccaaaaaaaaaaaaaaaaaaaaaaaaaaaaaaaaaaaaaaaaaaaaaaaaaaaaaaaaaaaaaaaaaaaaaaaaaaaaaaaaaaaaaaaaaaaaaaaaaaaaa

SEQ ID NO: 1463 - RNA, 828 nt, Artificial Sequence
  mRNA product Design i-3 (hSL-A100) comprising derived and/or modified sequence from RVA/1076/P[6]__AAA47337.1__P2_VP8*(41-223) (opt1)
aggagaaagcuuaccaugcaguacaucaaggccaacagcaaguucaucggcaucaccgagcugggcagcggguccggcgcccagaccaacuacgcgcccgugaccuggagccacggcgaggugaacgacagcacgaccaucgagcccguccucgacgggcccuaccagccgaccuccuucaagccgcccagcgacuacuggauccugcugaaccccaccaaccagcaggucgugcucgagggcacgaacaagaccgacaucuggguggcccugcugcucguggagcccaacgugaccaaccagucccggcaguacacccuguucggggagacgaagcagaucaccgucgagaacaacaccaacaaguggaaguucuucgagauguuccgcagcuccgugagcgccgaguuccagcacaagcggacccugacguccgacaccaagcucgccggcuuccugaaguucuacaacagcguguggaccuucuacggcgagacgccccacgccaccaccgacuacuccagcaccuccaaccugagcgaggucgagaccgcgauccacguggaguucuacaucaucccccgcucccaggagagcaagugcaacgaguacaucaacacggggcugugaggacuaguuauaagacugacuagcccgaugggccucccaacgggcccuccuccccuccuugcaccgagauuaaucaaaggcucuuuucagagccaccaaaaaaaaaaaaaaaaaaaaaaaaaaaaaaaaaaaaaaaaaaaaaaaaaaaaaaaaaaaaaaaaaaaaaaaaaaaaaaaaaaaaaaaaaaaaaaaaaaaaa

SEQ ID NO: 1464 - RNA, 828 nt, Artificial Sequence
  mRNA product Design i-3 (hSL-A100) comprising derived and/or modified sequence from RVA/BE1128/P[8]__AEX30671.1__P2_VP8*(41-223) (opt1)
aggagaaagcuuaccaugcaguacaucaaggccaacagcaaguucaucggcaucaccgagcugggcagcggguccggcgcccagacccgguacgcgcccgugaacuggggccacggggagaucaacgacagcaccaccgucgagcccauccucgacggcccguaccagccgacgaccuucaccccgcccaccgacuacuggauccugaucacguccaacaccaacggggugguguacgagagcaccaacaacuccgacuucuggaccgccgucaucgccguggagccccacgugaacccggucgaccgccaguacaacguguucggcgagaacaagcaguucaacgugcggaacgacagcgacaaguggaaguuccuggagauguuccgcggcuccagccagaacgacuucuacaaccggcgcacgcucaccuccgacacccggcuggucgggauccugaaguacggcgggcgcguguggaccuuccacggcgagacgccccgggccaccaccgacagcuccaacaccgccaaccucgacgggaucagcaucacgauccacuccgaguucuacaucaucccccgcagccaggaguccaagugcaacgaguacaucaacaacggccugugaggacuaguuauaagacugacuagcccgaugggccucccaacgggcccuccuccccuccuugcaccgagauuaaucaaaggcucuuuucagagccaccaaaaaaaaaaaaaaaaaaaaaaaaaaaaaaaaaaaaaaaaaaaaaaaaaaaaaaaaaaaaaaaaaaaaaaaaaaaaaaaaaaaaaaaaaaaaaaaaaaaaa

SEQ ID NO: 1465 - RNA, 828 nt, Artificial Sequence
  mRNA product Design i-3 (hSL-A100) comprising derived and/or modified sequence from RVA/Wa-VirWa/P[8]__ACR22783.1__P2_VP8*(41-223) (opt1)
aggagaaagcuuaccaugcaguacaucaaggccaacagcaaguucaucggcaucaccgagcugggcagcggguccggcgcccagacccgguacgcgcccgugaacugggggcacggcgagaucaacgacuccaccaccguggagcccauccucgacgggcccuaccagccgacgaccuucaccccgcccaacgacuacuggauccugaucaacagcaacaccaacggcgucguguacgaguccacgaacaacagcgacuucuggaccgccguggucgccaucgagccccacgugaacccgguggaccgccaguacaccaucuucggggaguccaagcaguucaacguccggaacgacagcaacaaguggaaguuccuggagauguuccgcuccagcucccagaacgaguucuacaaccggcgcacccucacgagcgacacccggcuggugggcauccugaaguacggcgggcgcguguggaccuuccacggcgagaccccgcgggccacgaccgacuccagcuccaccgccaaccucaacaacaucagcaucaccauccacuccgaguucuacaucaucccccgcagccaggagagcaagugcaacgaguacaucaacaacgggcugugaggacuaguuauaagacugacuagcccgaugggccucccaacgggcccuccuccccuccuugcaccgagauuaaucaaaggcucuuuucagagccaccaaaaaaaaaaaaaaaaaaaaaaaaaaaaaaaaaaaaaaaaaaaaaaaaaaaaaaaaaaaaaaaaaaaaaaaaaaaaaaaaaaaaaaaaaaaaaaaaaaaaa

SEQ ID NO: 1466 - RNA, 828 nt, Artificial Sequence
  mRNA product Design i-3 (hSL-A100) comprising derived and/or modified sequence from RVA/Wa/P[8]__AAA47290.1__P2_VP8*(41-223) (opt1)
aggagaaagcuuaccaugcaguacaucaaggccaacagcaaguucaucggcaucaccgagcugggcagcggguccggcgcccagacccgguacgcgcccgugaacugggggcacggcgagaucaacgacuccaccaccguggagcccauccucgacgggcccuaccagccgacgaccuucaccccgcccaacgacuacuggauccugaucaacagcaacaccaacggcgucguguacgaguccacgaacaacagcgacuucuggaccgccguggucgccaucgagccccacgugaaccccguggaccgccaguacaccaucuucggggaguccaagcaguucaacgucagcaacgacuccaacaaguggaaguuccuggagauguuccggagcuccagccagaacgaguucuacaaccgccggacccucacguccgacacccgcuucgugggcauccugaaguacggcgggcggguguggaccuuccacggcgagacgccccgcgccaccaccgacagcuccagcaccgccaaccugaacaacaucuccaucaccauccacagcgaguucuacaucaucccccggagccaggaguccaagugcaacgaguacaucaacaacgggcugugaggacuaguuauaagacugacuagcccgaugggccucccaacgggcccuccuccccuccuugcaccgagauuaaucaaaggcucuuuucagagccaccaaaaaaaaaaaaaaaaaaaaaaaaaaaaaaaaaaaaaaaaaaaaaaaaaaaaaaaaaaaaaaaaaaaaaaaaaaaaaaaaaaaaaaaaaaaaaaaaaaaaa

SEQ ID NO: 1467 - RNA, 828 nt, Artificial Sequence
  mRNA product Design i-3 (hSL-A100) comprising derived and/or modified sequence from RVA/Wa/P[8]__AAA66953.1__P2_VP8*(41-223) (opt1)
aggagaaagcuuaccaugcaguacaucaaggccaacagcaaguucaucggcaucaccgagcugggcagcggguccggcgcccagacccgguacgcgcccgugaacugggggcacggcgagaucaacgacuccaccaccguggagcccaugcucgacgggcccuaccagccgacgaccuucaccccgcccaacgacuacuggauccugaucaacagcaacaccaacggcgucguguacgaguccacgaacaacagcgacuucuggaccgccguggucgccaucgagccccacgugaaccccguggaccgccaguacaccaucuucggggaguccaagcaguucaacgucagcaacgacuccaacaaguggaaguuccuggagauguuccggagcuccagccagaacgaguucuacaaccgccggacccucacguccgacacccgcuucgugggcauccugaaguacggcgggcggguguggaccuuccacggcgagacgccccgcgccaccaccgacagcuccagcaccgccaaccugaacaacaucuccaucaccauccacagcgaguucuacaucaucccccggagccaggaguccaagugcaacgaguacaucaacaacgggcugugaggacuaguuauaagacugacuagcccgaugggccucccaacgggcccuccuccccuccuugcaccgagauuaaucaaaggcucuuuucagagccaccaaaaaaaaaaaaaaaaaaaaaaaaaaaaaaaaaaaaaaaaaaaaaaaaaaaaaaaaaaaaaaaaaaaaaaaaaaaaaaaaaaaaaaaaaaaaaaaaaaaaa

SEQ ID NO: 1468 - RNA, 1254 nt, Artificial Sequence
  mRNA product Design i-3 (hSL-A100) comprising derived and/or modified sequence from RVA/BE1058/P[4]__AEX30665.1__P2_VP8*(65-223)_Ferritin (opt1)
aggagaaagcuuaccaugcaguacaucaaggccaacagcaaguucaucggcaucaccgagcugggcagcggguccggccucgacggccccuaccagcccacgaccuucaagccgcccaacgacuacuggcugcugaucuccagcaacaccgacgggguggucuacgaguccaccaacaacagcgacuucuggacggccgugaucgccguggagccccacgucaaccagaccaaccgccaguacgugcuguucggcgagaacaagcaguucaacaucgagaacuccagcgacaaguggaaguucuucgagauguucaagggcaacucccagagcgacuucuccaaccggcgcacccugaccagcuccaaccggcugguggggaugcucaaguacggcgggcgcgucuggacguuccacggcgagaccccgcgggccaccaccgacagcuccagcacggccgaccugaacaacaucuccaucaucauccacagcgaguucuacaucaucccccgcagccaggaguccaagugcaacgaguacaucaacaacgggcugagcggcggggacaucaucaagcuccugaacgagcaggugaacaaggagaugcaguccagcaaccuguacauguccaugagcuccuggugcuacacccacagccucgacggcgccgggcuguuccuguucgaccacgccgcggaggaguacgagcacgccaagaagcucaucaucuuccugaacgagaacaacguccccgugcagcugaccuccaucagcgccccggagcacaaguucgagggccucacgcagaucuuccagaaggccuacgagcacgagcagcacaucuccgagagcaucaacaacaucguggaccacgccaucaaguccaaggaccacgcgaccuucaacuuccugcagugguacgucgccgagcagcacgaggaggaggugcuguucaaggacauccucgacaagaucgagcugaucgggaacgagaaccacggccuguaccucgccgaccaguacgugaaggggaucgccaagagccgcaaguccugaggacuaguuauaagacugacuagcccgaugggccucccaacgggcccuccuccccuccuugcaccgagauuaaucaaaggcucuuuucagagccaccaaaaaaaaaaaaaaaaaaaaaaaaaaaaaaaaaaaaaaaaaaaaaaaaaaaaaaaaaaaaaaaaaaaaaaaaaaaaaaaaaaaaaaaaaaaaaaaaaaaaa

SEQ ID NO: 1469 - RNA, 1254 nt, Artificial Sequence
  mRNA product Design i-3 (hSL-A100) comprising derived and/or modified sequence from RVA/DS-1/P[4]__CAD62680.1__P2_VP8*(65-223)_Ferritin (opt1)
aggagaaagcuuaccaugcaguacaucaaggccaacagcaaguucaucggcaucaccgagcugggcagcggguccggccucgacgggcccuaccagccgacgaccuucaagccgcccaacgacuacuggcugcugaucuccagcaacaccaacggcguggucuacgaguccaccaacaacaacgacuucuggacggccgugagcuccguggagccccacgucagccagaccaaccgccaguacauccucuucggggagaacaagcaguucaacguggagaacaacuccgacaaguggaaguucuucgagaccuucaccggcagcucccagggcaacuucagcaaccggcgcacgcugaccuccagcaaccggcugguggggaugcucaaguacggcgggcgcgucuggaccuuccacggcgagacgccccgggccaccaccgacuccagcaacaccgccgaccugaacaacaucagcaucaucauccacuccgaguucuacaucaucccccgcagccaggaguccaagugcaacgaguacaucaacaacgggcugagcggcggggacaucaucaagcuccugaacgagcaggugaacaaggagaugcaguccagcaaccuguacauguccaugagcuccuggugcuacacccacagccucgacggcgccgggcuguuccuguucgaccacgccgcggaggaguacgagcacgccaagaagcucaucaucuuccugaacgagaacaacguccccgugcagcugaccuccaucagcgccccggagcacaaguucgagggccucacgcagaucuuccagaaggccuacgagcacgagcagcacaucuccgagagcaucaacaacaucguggaccacgccaucaaguccaaggaccacgcgaccuucaacuuccugcagugguacgucgccgagcagcacgaggaggaggugcuguucaaggacauccucgacaagaucgagcugaucgggaacgagaaccacggccuguaccucgccgaccaguacgugaaggggaucgccaagagccgcaaguccugaggacuaguuauaagacugacuagcccgaugggccucccaacgggcccuccuccccuccuugcaccgagauuaaucaaaggcucuuuucagagccaccaaaaaaaaaaaaaaaaaaaaaaaaaaaaaaaaaaaaaaaaaaaaaaaaaaaaaaaaaaaaaaaaaaaaaaaaaaaaaaaaaaaaaaaaaaaaaaaaaaaaa

SEQ ID NO: 1470 - RNA, 1254 nt, Artificial Sequence; identical to SEQ ID NO: 1469
  mRNA product Design i-3 (hSL-A100) comprising derived and/or modified sequence from RVA/DS-1/P[4]__ABV53252.1__P2_VP8*(65-223)_Ferritin (opt1)

SEQ ID NO: 1471 - RNA, 1254 nt, Artificial Sequence
  mRNA product Design i-3 (hSL-A100) comprising derived and/or modified sequence from RVA/F01322/P[6]__AFA51886.1__P2_VP8*(65-223)_Ferritin (opt1)
aggagaaagcuuaccaugcaguacaucaaggccaacagcaaguucaucggcaucaccgagcugggcagcggguccggccucgacgggcccuaccagccgaccaacuucaagccgcccaacgacuacuggauccugcugaaccccaccaaccagcagguggugcucgagggcacgaacaagaccgacaucugggucgcccugcugcucguggagccgaacgugaccaaccagagccggcaguacacccuguucggggagacgaagcagaucaccgucgagaacaacaccaacaaguggaaguucuucgagauguuccgcuccagcguguccgccgaguuccagcacaagcggacccugacgagcgacaccaagcucgccggcuucaugaaguucuacaacuccguguggaccuuccacggcgagacccccaacgccacgaccgacuacagcuccaccagcaaccuguucgaggucgagaccgugauccacguggaguucuacaucaucccccgcucccaggagagcaagugcuccgaguacaucaacacggggcugagcggcggggacaucaucaagcuccugaacgagcaggugaacaaggagaugcaguccagcaaccuguacauguccaugagcuccuggugcuacacccacagccucgacggcgccgggcuguuccuguucgaccacgccgcggaggaguacgagcacgccaagaagcucaucaucuuccugaacgagaacaacguccccgugcagcugaccuccaucagcgccccggagcacaaguucgagggccucacgcagaucuuccagaaggccuacgagcacgagcagcacaucuccgagagcaucaacaacaucguggaccacgccaucaaguccaaggaccacgcgaccuucaacuuccugcagugguacgucgccgagcagcacgaggaggaggugcuguucaaggacauccucgacaagaucgagcugaucgggaacgagaaccacggccuguaccucgccgaccaguacgugaaggggaucgccaagagccgcaaguccugaggacuaguuauaagacugacuagcccgaugggccucccaacgggcccuccuccccuccuugcaccgagauuaaucaaaggcucuuuucagagccaccaaaaaaaaaaaaaaaaaaaaaaaaaaaaaaaaaaaaaaaaaaaaaaaaaaaaaaaaaaaaaaaaaaaaaaaaaaaaaaaaaaaaaaaaaaaaaaaaaaaaa

SEQ ID NO: 1472 - RNA, 1254 nt, Artificial Sequence
  mRNA product Design i-3 (hSL-A100) comprising derived and/or modified sequence from RVA/1076/P[6]__AAA47337.1__P2_VP8*(65-223)_Ferritin (opt1)
aggagaaagcuuaccaugcaguacaucaaggccaacagcaaguucaucggcaucaccgagcugggcagcggguccggccucgacgggcccuaccagccgaccuccuucaagccgcccagcgacuacuggauccugcugaaccccaccaaccagcaggucgugcucgagggcacgaacaagaccgacaucuggguggcccugcugcucguggagcccaacgugaccaaccagucccggcaguacacccuguucggggagacgaagcagaucaccgucgagaacaacaccaacaaguggaaguucuucgagauguuccgcagcuccgugagcgccgaguuccagcacaagcggacccugacguccgacaccaagcucgccggcuuccugaaguucuacaacagcguguggaccuucuacggcgagacgccccacgccaccaccgacuacuccagcaccuccaaccugagcgaggucgagaccgcgauccacguggaguucuacaucaucccccgcucccaggagagcaagugcaacgaguacaucaacacggggcugagcggcggggacaucaucaagcuccugaacgagcaggugaacaaggagaugcaguccagcaaccuguacauguccaugagcuccuggugcuacacccacagccucgacggcgccgggcuguuccuguucgaccacgccgcggaggaguacgagcacgccaagaagcucaucaucuuccugaacgagaacaacguccccgugcagcugaccuccaucagcgccccggagcacaaguucgagggccucacgcagaucuuccagaaggccuacgagcacgagcagcacaucuccgagagcaucaacaacaucguggaccacgccaucaaguccaaggaccacgcgaccuucaacuuccugcagugguacgucgccgagcagcacgaggaggaggugcuguucaaggacauccucgacaagaucgagcugaucgggaacgagaaccacggccuguaccucgccgaccaguacgugaaggggaucgccaagagccgcaaguccugaggacuaguuauaagacugacuagcccgaugggccucccaacgggcccuccuccccuccuugcaccgagauuaaucaaaggcucuuuucagagccaccaaaaaaaaaaaaaaaaaaaaaaaaaaaaaaaaaaaaaaaaaaaaaaaaaaaaaaaaaaaaaaaaaaaaaaaaaaaaaaaaaaaaaaaaaaaaaaaaaaaaa

SEQ ID NO: 1473 - RNA, 1254 nt, Artificial Sequence
  mRNA product Design i-3 (hSL-A100) comprising derived and/or modified sequence from RVA/BE1128/P[8]__AEX30671.1__P2_VP8*(65-223)_Ferritin (opt1)
aggagaaagcuuaccaugcaguacaucaaggccaacagcaaguucaucggcaucaccgagcugggcagcggguccggccucgacggcccguaccagccgacgaccuucaccccgcccaccgacuacuggauccugaucacguccaacaccaacggggugguguacgagagcaccaacaacuccgacuucuggaccgccgucaucgccguggagccccacgugaacccggucgaccgccaguacaacguguucggcgagaacaagcaguucaacgugcggaacgacagcgacaaguggaaguuccuggagauguuccgcggcuccagccagaacgacuucuacaaccggcgcacgcucaccuccgacacccggcuggucgggauccugaaguacggcgggcgcguguggaccuuccacggcgagacgccccgggccaccaccgacagcuccaacaccgccaaccucgacgggaucagcaucacgauccacuccgaguucuacaucaucccccgcagccaggaguccaagugcaacgaguacaucaacaacggccugagcggcggggacaucaucaagcuccugaacgagcaggugaacaaggagaugcaguccagcaaccuguacauguccaugagcuccuggugcuacacccacagccucgacggcgccgggcuguuccuguucgaccacgccgcggaggaguacgagcacgccaagaagcucaucaucuuccugaacgagaacaacguccccgugcagcugaccuccaucagcgccccggagcacaaguucgagggccucacgcagaucuuccagaaggccuacgagcacgagcagcacaucuccgagagcaucaacaacaucguggaccacgccaucaaguccaaggaccacgcgaccuucaacuuccugcagugguacgucgccgagcagcacgaggaggaggugcuguucaaggacauccucgacaagaucgagcugaucgggaacgagaaccacggccuguaccucgccgaccaguacgugaaggggaucgccaagagccgcaaguccugaggacuaguuauaagacugacuagcccgaugggccucccaacgggcccuccuccccuccuugcaccgagauuaaucaaaggcucuuuucagagccaccaaaaaaaaaaaaaaaaaaaaaaaaaaaaaaaaaaaaaaaaaaaaaaaaaaaaaaaaaaaaaaaaaaaaaaaaaaaaaaaaaaaaaaaaaaaaaaaaaaaaa

SEQ ID NO: 1474 - RNA, 1254 nt, Artificial Sequence
  mRNA product Design i-3 (hSL-A100) comprising derived and/or modified sequence from RVA/Wa-VirWa/P[8]__ACR22783.1__P2_VP8*(65-223)_Ferritin (opt1)
aggagaaagcuuaccaugcaguacaucaaggccaacagcaaguucaucggcaucaccgagcugggcagcggguccggccucgacgggcccuaccagccgacgaccuucaccccgcccaacgacuacuggauccugaucaacagcaacaccaacggcgucguguacgaguccacgaacaacagcgacuucuggaccgccguggucgccaucgagccccacgugaacccgguggaccgccaguacaccaucuucggggaguccaagcaguucaacguccggaacgacagcaacaaguggaaguuccuggagauguuccgcuccagcucccagaacgaguucuacaaccggcgcacccucacgagcgacacccggcuggugggcauccugaaguacggcgggcgcguguggaccuuccacggcgagaccccgcgggccacgaccgacuccagcuccaccgccaaccucaacaacaucagcaucaccauccacuccgaguucuacaucaucccccgcagccaggagagcaagugcaacgaguacaucaacaacgggcugagcggcggggacaucaucaagcuccugaacgagcaggugaacaaggagaugcaguccagcaaccuguacauguccaugagcuccuggugcuacacccacagccucgacggcgccgggcuguuccuguucgaccacgccgcggaggaguacgagcacgccaagaagcucaucaucuuccugaacgagaacaacguccccgugcagcugaccuccaucagcgccccggagcacaaguucgagggccucacgcagaucuuccagaaggccuacgagcacgagcagcacaucuccgagagcaucaacaacaucguggaccacgccaucaaguccaaggaccacgcgaccuucaacuuccugcagugguacgucgccgagcagcacgaggaggaggugcuguucaaggacauccucgacaagaucgagcugaucgggaacgagaaccacggccuguaccucgccgaccaguacgugaaggggaucgccaagagccgcaaguccugaggacuaguuauaagacugacuagcccgaugggccucccaacgggcccuccuccccuccuugcaccgagauuaaucaaaggcucuuuucagagccaccaaaaaaaaaaaaaaaaaaaaaaaaaaaaaaaaaaaaaaaaaaaaaaaaaaaaaaaaaaaaaaaaaaaaaaaaaaaaaaaaaaaaaaaaaaaaaaaaaaaaa

SEQ ID NO: 1475 - RNA, 1254 nt, Artificial Sequence
  mRNA product Design i-3 (hSL-A100) comprising derived and/or modified sequence from RVA/Wa/P[8]__AAA47290.1__P2_VP8*(65-223)_Ferritin (opt1)
aggagaaagcuuaccaugcaguacaucaaggccaacagcaaguucaucggcaucaccgagcugggcagcggguccggccucgacgggcccuaccagccgacgaccuucaccccgcccaacgacuacuggauccugaucaacagcaacaccaacggcgucguguacgaguccacgaacaacagcgacuucuggaccgccguggucgccaucgagccccacgugaaccccguggaccgccaguacaccaucuucggggaguccaagcaguucaacgucagcaacgacuccaacaaguggaaguuccuggagauguuccggagcuccagccagaacgaguucuacaaccgccggacccucacguccgacacccgcuucgugggcauccugaaguacggcgggcggguguggaccuuccacggcgagacgccccgcgccaccaccgacagcuccagcaccgccaaccugaacaacaucuccaucaccauccacagcgaguucuacaucaucccccggagccaggaguccaagugcaacgaguacaucaacaacgggcugagcggcggggacaucaucaagcuccugaacgagcaggugaacaaggagaugcaguccagcaaccuguacauguccaugagcuccuggugcuacacccacagccucgacggcgccgggcuguuccuguucgaccacgccgcggaggaguacgagcacgccaagaagcucaucaucuuccugaacgagaacaacguccccgugcagcugaccuccaucagcgccccggagcacaaguucgagggccucacgcagaucuuccagaaggccuacgagcacgagcagcacaucuccgagagcaucaacaacaucguggaccacgccaucaaguccaaggaccacgcgaccuucaacuuccugcagugguacgucgccgagcagcacgaggaggaggugcuguucaaggacauccucgacaagaucgagcugaucgggaacgagaaccacggccuguaccucgccgaccaguacgugaaggggaucgccaagagccgcaaguccugaggacuaguuauaagacugacuagcccgaugggccucccaacgggcccuccuccccuccuugcaccgagauuaaucaaaggcucuuuucagagccaccaaaaaaaaaaaaaaaaaaaaaaaaaaaaaaaaaaaaaaaaaaaaaaaaaaaaaaaaaaaaaaaaaaaaaaaaaaaaaaaaaaaaaaaaaaaaaaaaaaaaa

SEQ ID NO: 1476 - RNA, 1254 nt, Artificial Sequence; identical to SEQ ID NO: 1475
  mRNA product Design i-3 (hSL-A100) comprising derived and/or modified sequence from RVA/Wa/P[8]__AAA66953.1__P2_VP8*(65-223)_Ferritin (opt1)

SEQ ID NO: 1477 - RNA, 1326 nt, Artificial Sequence
  mRNA product Design i-3 (hSL-A100) comprising derived and/or modified sequence from RVA/BE1058/P[4]__AEX30665.1__P2_VP8*(41-223)_Ferritin (opt1)
aggagaaagcuuaccaugcaguacaucaaggccaacagcaaguucaucggcaucaccgagcugggcagcggguccggcgcccagacccgguacgcgcccgugaacuggggccacggggagaucaacgacagcaccaccgucgagcccgugcucgacggccccuaccagcccacgaccuucaagccgcccaacgacuacuggcugcugaucuccagcaacaccgacgggguggucuacgaguccaccaacaacagcgacuucuggacggccgugaucgccguggagccccacgucaaccagaccaaccgccaguacgugcuguucggcgagaacaagcaguucaacaucgagaacuccagcgacaaguggaaguucuucgagauguucaagggcaacucccagagcgacuucuccaaccggcgcacccugaccagcuccaaccggcugguggggaugcucaaguacggcgggcgcgucuggacguuccacggcgagaccccgcgggccaccaccgacagcuccagcacggccgaccugaacaacaucuccaucaucauccacagcgaguucuacaucaucccccgcagccaggaguccaagugcaacgaguacaucaacaacgggcugagcggcggggacaucaucaagcuccugaacgagcaggugaacaaggagaugcaguccagcaaccuguacauguccaugagcuccuggugcuacacccacagccucgacggcgccgggcuguuccuguucgaccacgccgcggaggaguacgagcacgccaagaagcucaucaucuuccugaacgagaacaacguccccgugcagcugaccuccaucagcgccccggagcacaaguucgagggccucacgcagaucuuccagaaggccuacgagcacgagcagcacaucuccgagagcaucaacaacaucguggaccacgccaucaaguccaaggaccacgcgaccuucaacuuccugcagugguacgucgccgagcagcacgaggaggaggugcuguucaaggacauccucgacaagaucgagcugaucgggaacgagaaccacggccuguaccucgccgaccaguacgugaaggggaucgccaagagccgcaaguccugaggacuaguuauaagacugacuagcccgaugggccucccaacgggcccuccuccccuccuugcaccgagauuaaucaaaggcucuuuucagagccaccaaaaaaaaaaaaaaaaaaaaaaaaaaaaaaaaaaaaaaaaaaaaaaaaaaaaaaaaaaaaaaaaaaaaaaaaaaaaaaaaaaaaaaaaaaaaaaaaaaaaa

SEQ ID NO: 1478 - RNA, 1326 nt, Artificial Sequence
  mRNA product Design i-3 (hSL-A100) comprising derived and/or modified sequence from RVA/DS-1/P[4]__CAD62680.1__P2_VP8*(41-223)_Ferritin (opt1)
aggagaaagcuuaccaugcaguacaucaaggccaacagcaaguucaucggcaucaccgagcugggcagcggguccggcgcccagacccgguacgcgcccgugaacuggggcuccugggagaucaacgacagcaccaccgucgagcccgugcucgacgggcccuaccagccgacgaccuucaagccgcccaacgacuacuggcugcugaucuccagcaacaccaacggcguggucuacgaguccaccaacaacaacgacuucuggacggccgugagcuccguggagccccacgucagccagaccaaccgccaguacauccucuucggggagaacaagcaguucaacguggagaacaacuccgacaaguggaaguucuucgagaccuucaccggcagcucccagggcaacuucagcaaccggcgcacgcugaccuccagcaaccggcugguggggaugcucaaguacggcgggcgcgucuggaccuuccacggcgagacgccccgggccaccaccgacuccagcaacaccgccgaccugaacaacaucagcaucaucauccacuccgaguucuacaucaucccccgcagccaggaguccaagugcaacgaguacaucaacaacgggcugagcggcggggacaucaucaagcuccugaacgagcaggugaacaaggagaugcaguccagcaaccuguacauguccaugagcuccuggugcuacacccacagccucgacggcgccgggcuguuccuguucgaccacgccgcggaggaguacgagcacgccaagaagcucaucaucuuccugaacgagaacaacguccccgugcagcugaccuccaucagcgccccggagcacaaguucgagggccucacgcagaucuuccagaaggccuacgagcacgagcagcacaucuccgagagcaucaacaacaucguggaccacgccaucaaguccaaggaccacgcgaccuucaacuuccugcagugguacgucgccgagcagcacgaggaggaggugcuguucaaggacauccucgacaagaucgagcugaucgggaacgagaaccacggccuguaccucgccgaccaguacgugaaggggaucgccaagagccgcaaguccugaggacuaguuauaagacugacuagcccgaugggccucccaacgggcccuccuccccuccuugcaccgagauuaaucaaaggcucuuuucagagccaccaaaaaaaaaaaaaaaaaaaaaaaaaaaaaaaaaaaaaaaaaaaaaaaaaaaaaaaaaaaaaaaaaaaaaaaaaaaaaaaaaaaaaaaaaaaaaaaaaaaaa

SEQ ID NO: 1479 - RNA, 1326 nt, Artificial Sequence; identical to SEQ ID NO: 1478
  mRNA product Design i-3 (hSL-A100) comprising derived and/or modified sequence from RVA/DS-1/P[4]__ABV53252.1__P2_VP8*(41-223)_Ferritin (opt1)

SEQ ID NO: 1480 - RNA, 1326 nt, Artificial Sequence
  mRNA product Design i-3 (hSL-A100) comprising derived and/or modified sequence from RVA/F01322/P[6]__AFA51886.1__P2_VP8*(41-223)_Ferritin (opt1)
aggagaaagcuuaccaugcaguacaucaaggccaacagcaaguucaucggcaucaccgagcugggcagcggguccggcgcccagaccaacuacgcgcccgugaccuggagccacggcgaggugaacgacuccacgaccaucgagcccguccucgacgggcccuaccagccgaccaacuucaagccgcccaacgacuacuggauccugcugaaccccaccaaccagcagguggugcucgagggcacgaacaagaccgacaucugggucgcccugcugcucguggagccgaacgugaccaaccagagccggcaguacacccuguucggggagacgaagcagaucaccgucgagaacaacaccaacaaguggaaguucuucgagauguuccgcuccagcguguccgccgaguuccagcacaagcggacccugacgagcgacaccaagcucgccggcuucaugaaguucuacaacuccguguggaccuuccacggcgagacccccaacgccacgaccgacuacagcuccaccagcaaccuguucgaggucgagaccgugauccacguggaguucuacaucaucccccgcucccaggagagcaagugcuccgaguacaucaacacggggcugagcggcggggacaucaucaagcuccugaacgagcaggugaacaaggagaugcaguccagcaaccuguacauguccaugagcuccuggugcuacacccacagccucgacggcgccgggcuguuccuguucgaccacgccgcggaggaguacgagcacgccaagaagcucaucaucuuccugaacgagaacaacguccccgugcagcugaccuccaucagcgccccggagcacaaguucgagggccucacgcagaucuuccagaaggccuacgagcacgagcagcacaucuccgagagcaucaacaacaucguggaccacgccaucaaguccaaggaccacgcgaccuucaacuuccugcagugguacgucgccgagcagcacgaggaggaggugcuguucaaggacauccucgacaagaucgagcugaucgggaacgagaaccacggccuguaccucgccgaccaguacgugaaggggaucgccaagagccgcaaguccugaggacuaguuauaagacugacuagcccgaugggccucccaacgggcccuccuccccuccuugcaccgagauuaaucaaaggcucuuuucagagccaccaaaaaaaaaaaaaaaaaaaaaaaaaaaaaaaaaaaaaaaaaaaaaaaaaaaaaaaaaaaaaaaaaaaaaaaaaaaaaaaaaaaaaaaaaaaaaaaaaaaaa

SEQ ID NO: 1481 - RNA, 1326 nt, Artificial Sequence
  mRNA product Design i-3 (hSL-A100) comprising derived and/or modified sequence from RVA/1076/P[6]__AAA47337.1__P2_VP8*(41-223)_Ferritin (opt1)
aggagaaagcuuaccaugcaguacaucaaggccaacagcaaguucaucggcaucaccgagcugggcagcggguccggcgcccagaccaacuacgcgcccgugaccuggagccacggcgaggugaacgacagcacgaccaucgagcccguccucgacgggcccuaccagccgaccuccuucaagccgcccagcgacuacuggauccugcugaaccccaccaaccagcaggucgugcucgagggcacgaacaagaccgacaucuggguggcccugcugcucguggagcccaacgugaccaaccagucccggcaguacacccuguucggggagacgaagcagaucaccgucgagaacaacaccaacaaguggaaguucuucgagauguuccgcagcuccgugagcgccgaguuccagcacaagcggacccugacguccgacaccaagcucgccggcuuccugaaguucuacaacagcguguggaccuucuacggcgagacgccccacgccaccaccgacuacuccagcaccuccaaccugagcgaggucgagaccgcgauccacguggaguucuacaucaucccccgcucccaggagagcaagugcaacgaguacaucaacacggggcugagcggcggggacaucaucaagcuccugaacgagcaggugaacaaggagaugcaguccagcaaccuguacauguccaugagcuccuggugcuacacccacagccucgacggcgccgggcuguuccuguucgaccacgccgcggaggaguacgagcacgccaagaagcucaucaucuuccugaacgagaacaacguccccgugcagcugaccuccaucagcgccccggagcacaaguucgagggccucacgcagaucuuccagaaggccuacgagcacgagcagcacaucuccgagagcaucaacaacaucguggaccacgccaucaaguccaaggaccacgcgaccuucaacuuccugcagugguacgucgccgagcagcacgaggaggaggugcuguucaaggacauccucgacaagaucgagcugaucgggaacgagaaccacggccuguaccucgccgaccaguacgugaaggggaucgccaagagccgcaaguccugaggacuaguuauaagacugacuagcccgaugggccucccaacgggcccuccuccccuccuugcaccgagauuaaucaaaggcucuuuucagagccaccaaaaaaaaaaaaaaaaaaaaaaaaaaaaaaaaaaaaaaaaaaaaaaaaaaaaaaaaaaaaaaaaaaaaaaaaaaaaaaaaaaaaaaaaaaaaaaaaaaaaa

SEQ ID NO: 1482 - RNA, 1326 nt, Artificial Sequence
  mRNA product Design i-3 (hSL-A100) comprising derived and/or modified sequence from RVA/BE1128/P[8]__AEX30671.1__P2_VP8*(41-223)_Ferritin (opt1)
aggagaaagcuuaccaugcaguacaucaaggccaacagcaaguucaucggcaucaccgagcugggcagcggguccggcgcccagacccgguacgcgcccgugaacuggggccacggggagaucaacgacagcaccaccgucgagcccauccucgacggcccguaccagccgacgaccuucaccccgcccaccgacuacuggauccugaucacguccaacaccaacggggugguguacgagagcaccaacaacuccgacuucuggaccgccgucaucgccguggagccccacgugaacccggucgaccgccaguacaacguguucggcgagaacaagcaguucaacgugcggaacgacagcgacaaguggaaguuccuggagauguuccgcggcuccagccagaacgacuucuacaaccggcgcacgcucaccuccgacacccggcuggucgggauccugaaguacggcgggcgcguguggaccuuccacggcgagacgccccgggccaccaccgacagcuccaacaccgccaaccucgacgggaucagcaucacgauccacuccgaguucuacaucaucccccgcagccaggaguccaagugcaacgaguacaucaacaacggccugagcggcggggacaucaucaagcuccugaacgagcaggugaacaaggagaugcaguccagcaaccuguacauguccaugagcuccuggugcuacacccacagccucgacggcgccgggcuguuccuguucgaccacgccgcggaggaguacgagcacgccaagaagcucaucaucuuccugaacgagaacaacguccccgugcagcugaccuccaucagcgccccggagcacaaguucgagggccucacgcagaucuuccagaaggccuacgagcacgagcagcacaucuccgagagcaucaacaacaucguggaccacgccaucaaguccaaggaccacgcgaccuucaacuuccugcagugguacgucgccgagcagcacgaggaggaggugcuguucaaggacauccucgacaagaucgagcugaucgggaacgagaaccacggccuguaccucgccgaccaguacgugaaggggaucgccaagagccgcaaguccugaggacuaguuauaagacugacuagcccgaugggccucccaacgggcccuccuccccuccuugcaccgagauuaaucaaaggcucuuuucagagccaccaaaaaaaaaaaaaaaaaaaaaaaaaaaaaaaaaaaaaaaaaaaaaaaaaaaaaaaaaaaaaaaaaaaaaaaaaaaaaaaaaaaaaaaaaaaaaaaaaaaaa

SEQ ID NO: 1483 - RNA, 1326 nt, Artificial Sequence
  mRNA product Design i-3 (hSL-A100) comprising derived and/or modified sequence from RVA/Wa-VirWa/P[8]__ACR22783.1__P2_VP8*(41-223)_Ferritin (opt1)
aggagaaagcuuaccaugcaguacaucaaggccaacagcaaguucaucggcaucaccgagcugggcagcggguccggcgcccagacccgguacgcgcccgugaacugggggcacggcgagaucaacgacuccaccaccguggagcccauccucgacgggcccuaccagccgacgaccuucaccccgcccaacgacuacuggauccugaucaacagcaacaccaacggcgucguguacgaguccacgaacaacagcgacuucuggaccgccguggucgccaucgagccccacgugaacccgguggaccgccaguacaccaucuucggggaguccaagcaguucaacguccggaacgacagcaacaaguggaaguuccuggagauguuccgcuccagcucccagaacgaguucuacaaccggcgcacccucacgagcgacacccggcuggugggcauccugaaguacggcgggcgcguguggaccuuccacggcgagaccccgcgggccacgaccgacuccagcuccaccgccaaccucaacaacaucagcaucaccauccacuccgaguucuacaucaucccccgcagccaggagagcaagugcaacgaguacaucaacaacgggcugagcggcggggacaucaucaagcuccugaacgagcaggugaacaaggagaugcaguccagcaaccuguacauguccaugagcuccuggugcuacacccacagccucgacggcgccgggcuguuccuguucgaccacgccgcggaggaguacgagcacgccaagaagcucaucaucuuccugaacgagaacaacguccccgugcagcugaccuccaucagcgccccggagcacaaguucgagggccucacgcagaucuuccagaaggccuacgagcacgagcagcacaucuccgagagcaucaacaacaucguggaccacgccaucaaguccaaggaccacgcgaccuucaacuuccugcagugguacgucgccgagcagcacgaggaggaggugcuguucaaggacauccucgacaagaucgagcugaucgggaacgagaaccacggccuguaccucgccgaccaguacgugaaggggaucgccaagagccgcaaguccugaggacuaguuauaagacugacuagcccgaugggccucccaacgggcccuccuccccuccuugcaccgagauuaaucaaaggcucuuuucagagccaccaaaaaaaaaaaaaaaaaaaaaaaaaaaaaaaaaaaaaaaaaaaaaaaaaaaaaaaaaaaaaaaaaaaaaaaaaaaaaaaaaaaaaaaaaaaaaaaaaaaaa

SEQ ID NO: 1484 - RNA, 1326 nt, Artificial Sequence
  mRNA product Design i-3 (hSL-A100) comprising derived and/or modified sequence from RVA/Wa/P[8]__AAA47290.1__P2_VP8*(41-223)_Ferritin (opt1)
aggagaaagcuuaccaugcaguacaucaaggccaacagcaaguucaucggcaucaccgagcugggcagcggguccggcgcccagacccgguacgcgcccgugaacugggggcacggcgagaucaacgacuccaccaccguggagcccauccucgacgggcccuaccagccgacgaccuucaccccgcccaacgacuacuggauccugaucaacagcaacaccaacggcgucguguacgaguccacgaacaacagcgacuucuggaccgccguggucgccaucgagccccacgugaaccccguggaccgccaguacaccaucuucggggaguccaagcaguucaacgucagcaacgacuccaacaaguggaaguuccuggagauguuccggagcuccagccagaacgaguucuacaaccgccggacccucacguccgacacccgcuucgugggcauccugaaguacggcgggcggguguggaccuuccacggcgagacgccccgcgccaccaccgacagcuccagcaccgccaaccugaacaacaucuccaucaccauccacagcgaguucuacaucaucccccggagccaggaguccaagugcaacgaguacaucaacaacgggcugagcggcggggacaucaucaagcuccugaacgagcaggugaacaaggagaugcaguccagcaaccuguacauguccaugagcuccuggugcuacacccacagccucgacggcgccgggcuguuccuguucgaccacgccgcggaggaguacgagcacgccaagaagcucaucaucuuccugaacgagaacaacguccccgugcagcugaccuccaucagcgccccggagcacaaguucgagggccucacgcagaucuuccagaaggccuacgagcacgagcagcacaucuccgagagcaucaacaacaucguggaccacgccaucaaguccaaggaccacgcgaccuucaacuuccugcagugguacgucgccgagcagcacgaggaggaggugcuguucaaggacauccucgacaagaucgagcugaucgggaacgagaaccacggccuguaccucgccgaccaguacgugaaggggaucgccaagagccgcaaguccugaggacuaguuauaagacugacuagcccgaugggccucccaacgggcccuccuccccuccuugcaccgagauuaaucaaaggcucuuuucagagccaccaaaaaaaaaaaaaaaaaaaaaaaaaaaaaaaaaaaaaaaaaaaaaaaaaaaaaaaaaaaaaaaaaaaaaaaaaaaaaaaaaaaaaaaaaaaaaaaaaaaaa

SEQ ID NO: 1485 - RNA, 1326 nt, Artificial Sequence
  mRNA product Design i-3 (hSL-A100) comprising derived and/or modified sequence from RVA/Wa/P[8]__AAA66953.1__P2_VP8*(41-223)_Ferritin (opt1)
aggagaaagcuuaccaugcaguacaucaaggccaacagcaaguucaucggcaucaccgagcugggcagcggguccggcgcccagacccgguacgcgcccgugaacugggggcacggcgagaucaacgacuccaccaccguggagcccaugcucgacgggcccuaccagccgacgaccuucaccccgcccaacgacuacuggauccugaucaacagcaacaccaacggcgucguguacgaguccacgaacaacagcgacuucuggaccgccguggucgccaucgagccccacgugaaccccguggaccgccaguacaccaucuucggggaguccaagcaguucaacgucagcaacgacuccaacaaguggaaguuccuggagauguuccggagcuccagccagaacgaguucuacaaccgccggacccucacguccgacacccgcuucgugggcauccugaaguacggcgggcggguguggaccuuccacggcgagacgccccgcgccaccaccgacagcuccagcaccgccaaccugaacaacaucuccaucaccauccacagcgaguucuacaucaucccccggagccaggaguccaagugcaacgaguacaucaacaacgggcugagcggcggggacaucaucaagcuccugaacgagcaggugaacaaggagaugcaguccagcaaccuguacauguccaugagcuccuggugcuacacccacagccucgacggcgccgggcuguuccuguucgaccacgccgcggaggaguacgagcacgccaagaagcucaucaucuuccugaacgagaacaacguccccgugcagcugaccuccaucagcgccccggagcacaaguucgagggccucacgcagaucuuccagaaggccuacgagcacgagcagcacaucuccgagagcaucaacaacaucguggaccacgccaucaaguccaaggaccacgcgaccuucaacuuccugcagugguacgucgccgagcagcacgaggaggaggugcuguucaaggacauccucgacaagaucgagcugaucgggaacgagaaccacggccuguaccucgccgaccaguacgugaaggggaucgccaagagccgcaaguccugaggacuaguuauaagacugacuagcccgaugggccucccaacgggcccuccuccccuccuugcaccgagauuaaucaaaggcucuuuucagagccaccaaaaaaaaaaaaaaaaaaaaaaaaaaaaaaaaaaaaaaaaaaaaaaaaaaaaaaaaaaaaaaaaaaaaaaaaaaaaaaaaaaaaaaaaaaaaaaaaaaaaa

SEQ ID NO: 1486 - RNA, 1260 nt, Artificial Sequence
  mRNA product Design i-3 (hSL-A100) comprising derived and/or modified sequence from RVA/BE1058/P[4]__AEX30665.1__LumSynt_P2_VP8*(65-223) (opt1)
aggagaaagcuuaccaugcagaucuacgagggcaagcugaccgccgaggggcuccgcuucggcaucguggccagccgguucaaccacgcgcuggucgaccgccugguggagggggccaucgacgccaucgugcggcacggcgggcgcgaggaggacaucacccucguccgggugcccggcuccugggagaucccgguggccgccggcgagcuggcccgcaaggaggacaucgacgcggucaucgccaucggggugcugauccggggcgccacgccccacuucgacuacaucgccagcgagguguccaaggggcucgcggaccugagccuggagcuccgcaagcccaucaccuucggcgucaucaccgccgacacccuggagcaggccaucgagcgggccgggacgaagcacggcaacaagggcugggaggccgcgcuguccgccaucgagauggccaaccucuucaagagccugcgcggcgggagcggcggguccggcgggagcggcggcuccgggggcgggcaguacaucaaggccaacagcaaguucaucggcaucaccgagcugggcagcggguccggccucgacggccccuaccagcccacgaccuucaagccgcccaacgacuacuggcugcugaucuccagcaacaccgacgggguggucuacgaguccaccaacaacagcgacuucuggacggccgugaucgccguggagccccacgucaaccagaccaaccgccaguacgugcuguucggcgagaacaagcaguucaacaucgagaacuccagcgacaaguggaaguucuucgagauguucaagggcaacucccagagcgacuucuccaaccggcgcacccugaccagcuccaaccggcugguggggaugcucaaguacggcgggcgcgucuggacguuccacggcgagaccccgcgggccaccaccgacagcuccagcacggccgaccugaacaacaucuccaucaucauccacagcgaguucuacaucaucccccgcagccaggaguccaagugcaacgaguacaucaacaacgggcugugaggacuaguuauaagacugacuagcccgaugggccucccaacgggcccuccuccccuccuugcaccgagauuaaucaaaggcucuuuucagagccaccaaaaaaaaaaaaaaaaaaaaaaaaaaaaaaaaaaaaaaaaaaaaaaaaaaaaaaaaaaaaaaaaaaaaaaaaaaaaaaaaaaaaaaaaaaaaaaaaaaaaa

SEQ ID NO: 1487 - RNA, 1260 nt, Artificial Sequence
  mRNA product Design i-3 (hSL-A100) comprising derived and/or modified sequence from RVA/DS-1/P[4]__CAD62680.1__LumSynt_P2_VP8*(65-223) (opt1)
aggagaaagcuuaccaugcagaucuacgagggcaagcugaccgccgaggggcuccgcuucggcaucguggccagccgguucaaccacgcgcuggucgaccgccugguggagggggccaucgacgccaucgugcggcacggcgggcgcgaggaggacaucacccucguccgggugcccggcuccugggagaucccgguggccgccggcgagcuggcccgcaaggaggacaucgacgcggucaucgccaucggggugcugauccggggcgccacgccccacuucgacuacaucgccagcgagguguccaaggggcucgcggaccugagccuggagcuccgcaagcccaucaccuucggcgucaucaccgccgacacccuggagcaggccaucgagcgggccgggacgaagcacggcaacaagggcugggaggccgcgcuguccgccaucgagauggccaaccucuucaagagccugcgcggcgggagcggcggguccggcgggagcggcggcuccgggggcgggcaguacaucaaggccaacagcaaguucaucggcaucaccgagcugggcagcggguccggccucgacgggcccuaccagccgacgaccuucaagccgcccaacgacuacuggcugcugaucuccagcaacaccaacggcguggucuacgaguccaccaacaacaacgacuucuggacggccgugagcuccguggagccccacgucagccagaccaaccgccaguacauccucuucggggagaacaagcaguucaacguggagaacaacuccgacaaguggaaguucuucgagaccuucaccggcagcucccagggcaacuucagcaaccggcgcacgcugaccuccagcaaccggcugguggggaugcucaaguacggcgggcgcgucuggaccuuccacggcgagacgccccgggccaccaccgacuccagcaacaccgccgaccugaacaacaucagcaucaucauccacuccgaguucuacaucaucccccgcagccaggaguccaagugcaacgaguacaucaacaacgggcugugaggacuaguuauaagacugacuagcccgaugggccucccaacgggcccuccuccccuccuugcaccgagauuaaucaaaggcucuuuucagagccaccaaaaaaaaaaaaaaaaaaaaaaaaaaaaaaaaaaaaaaaaaaaaaaaaaaaaaaaaaaaaaaaaaaaaaaaaaaaaaaaaaaaaaaaaaaaaaaaaaaaaa

SEQ ID NO: 1488 - RNA, 1260 nt, Artificial Sequence; identical to SEQ ID NO: 1487
  mRNA product Design i-3 (hSL-A100) comprising derived and/or modified sequence from RVA/DS-1/P[4]__ABV53252.1__LumSynt_P2_VP8*(65-223) (opt1)

SEQ ID NO: 1489 - RNA, 1260 nt, Artificial Sequence
  mRNA product Design i-3 (hSL-A100) comprising derived and/or modified sequence from RVA/F01322/P[6]__AFA51886.1__LumSynt_P2_VP8*(65-223) (opt1)
aggagaaagcuuaccaugcagaucuacgagggcaagcugaccgccgaggggcuccgcuucggcaucguggccagccgguucaaccacgcgcuggucgaccgccugguggagggggccaucgacgccaucgugcggcacggcgggcgcgaggaggacaucacccucguccgggugcccggcuccugggagaucccgguggccgccggcgagcuggcccgcaaggaggacaucgacgcggucaucgccaucggggugcugauccggggcgccacgccccacuucgacuacaucgccagcgagguguccaaggggcucgcggaccugagccuggagcuccgcaagcccaucaccuucggcgucaucaccgccgacacccuggagcaggccaucgagcgggccgggacgaagcacggcaacaagggcugggaggccgcgcuguccgccaucgagauggccaaccucuucaagagccugcgcggcgggagcggcggguccggcgggagcggcggcuccgggggcgggcaguacaucaaggccaacagcaaguucaucggcaucaccgagcugggcagcggguccggccucgacgggcccuaccagccgaccaacuucaagccgcccaacgacuacuggauccugcugaaccccaccaaccagcagguggugcucgagggcacgaacaagaccgacaucugggucgcccugcugcucguggagccgaacgugaccaaccagagccggcaguacacccuguucggggagacgaagcagaucaccgucgagaacaacaccaacaaguggaaguucuucgagauguuccgcuccagcguguccgccgaguuccagcacaagcggacccugacgagcgacaccaagcucgccggcuucaugaaguucuacaacuccguguggaccuuccacggcgagacccccaacgccacgaccgacuacagcuccaccagcaaccuguucgaggucgagaccgugauccacguggaguucuacaucaucccccgcucccaggagagcaagugcuccgaguacaucaacacggggcugugaggacuaguuauaagacugacuagcccgaugggccucccaacgggcccuccuccccuccuugcaccgagauuaaucaaaggcucuuuucagagccaccaaaaaaaaaaaaaaaaaaaaaaaaaaaaaaaaaaaaaaaaaaaaaaaaaaaaaaaaaaaaaaaaaaaaaaaaaaaaaaaaaaaaaaaaaaaaaaaaaaaaa

SEQ ID NO: 1490 - RNA, 1260 nt, Artificial Sequence
  mRNA product Design i-3 (hSL-A100) comprising derived and/or modified sequence from RVA/1076/P[6]__AAA47337.1__LumSynt_P2_VP8*(65-223) (opt1)
aggagaaagcuuaccaugcagaucuacgagggcaagcugaccgccgaggggcuccgcuucggcaucguggccagccgguucaaccacgcgcuggucgaccgccugguggagggggccaucgacgccaucgugcggcacggcgggcgcgaggaggacaucacccucguccgggugcccggcuccugggagaucccgguggccgccggcgagcuggcccgcaaggaggacaucgacgcggucaucgccaucggggugcugauccggggcgccacgccccacuucgacuacaucgccagcgagguguccaaggggcucgcggaccugagccuggagcuccgcaagcccaucaccuucggcgucaucaccgccgacacccuggagcaggccaucgagcgggccgggacgaagcacggcaacaagggcugggaggccgcgcuguccgccaucgagauggccaaccucuucaagagccugcgcggcgggagcggcggguccggcgggagcggcggcuccgggggcgggcaguacaucaaggccaacagcaaguucaucggcaucaccgagcugggcagcggguccggccucgacgggcccuaccagccgaccuccuucaagccgcccagcgacuacuggauccugcugaaccccaccaaccagcaggucgugcucgagggcacgaacaagaccgacaucuggguggcccugcugcucguggagcccaacgugaccaaccagucccggcaguacacccuguucggggagacgaagcagaucaccgucgagaacaacaccaacaaguggaaguucuucgagauguuccgcagcuccgugagcgccgaguuccagcacaagcggacccugacguccgacaccaagcucgccggcuuccugaaguucuacaacagcguguggaccuucuacggcgagacgccccacgccaccaccgacuacuccagcaccuccaaccugagcgaggucgagaccgcgauccacguggaguucuacaucaucccccgcucccaggagagcaagugcaacgaguacaucaacacggggcugugaggacuaguuauaagacugacuagcccgaugggccucccaacgggcccuccuccccuccuugcaccgagauuaaucaaaggcucuuuucagagccaccaaaaaaaaaaaaaaaaaaaaaaaaaaaaaaaaaaaaaaaaaaaaaaaaaaaaaaaaaaaaaaaaaaaaaaaaaaaaaaaaaaaaaaaaaaaaaaaaaaaaa

SEQ ID NO: 1491 - RNA, 1260 nt, Artificial Sequence
  mRNA product Design i-3 (hSL-A100) comprising derived and/or modified sequence from RVA/BE1128/P[8]__AEX30671.1__LumSynt_P2_VP8*(65-223) (opt1)
aggagaaagcuuaccaugcagaucuacgagggcaagcugaccgccgaggggcuccgcuucggcaucguggccagccgguucaaccacgcgcuggucgaccgccugguggagggggccaucgacgccaucgugcggcacggcgggcgcgaggaggacaucacccucguccgggugcccggcuccugggagaucccgguggccgccggcgagcuggcccgcaaggaggacaucgacgcggucaucgccaucggggugcugauccggggcgccacgccccacuucgacuacaucgccagcgagguguccaaggggcucgcggaccugagccuggagcuccgcaagcccaucaccuucggcgucaucaccgccgacacccuggagcaggccaucgagcgggccgggacgaagcacggcaacaagggcugggaggccgcgcuguccgccaucgagauggccaaccucuucaagagccugcgcggcgggagcggcggguccggcgggagcggcggcuccgggggcgggcaguacaucaaggccaacagcaaguucaucggcaucaccgagcugggcagcggguccggccucgacggcccguaccagccgacgaccuucaccccgcccaccgacuacuggauccugaucacguccaacaccaacggggugguguacgagagcaccaacaacuccgacuucuggaccgccgucaucgccguggagccccacgugaacccggucgaccgccaguacaacguguucggcgagaacaagcaguucaacgugcggaacgacagcgacaaguggaaguuccuggagauguuccgcggcuccagccagaacgacuucuacaaccggcgcacgcucaccuccgacacccggcuggucgggauccugaaguacggcgggcgcguguggaccuuccacggcgagacgccccgggccaccaccgacagcuccaacaccgccaaccucgacgggaucagcaucacgauccacuccgaguucuacaucaucccccgcagccaggaguccaagugcaacgaguacaucaacaacggccugugaggacuaguuauaagacugacuagcccgaugggccucccaacgggcccuccuccccuccuugcaccgagauuaaucaaaggcucuuuucagagccaccaaaaaaaaaaaaaaaaaaaaaaaaaaaaaaaaaaaaaaaaaaaaaaaaaaaaaaaaaaaaaaaaaaaaaaaaaaaaaaaaaaaaaaaaaaaaaaaaaaaaa

SEQ ID NO: 1492 - RNA, 1260 nt, Artificial Sequence
  mRNA product Design i-3 (hSL-A100) comprising derived and/or modified sequence from RVA/Wa-VirWa/P[8]__ACR22783.1__LumSynt_P2_VP8*(65-223) (opt1)
aggagaaagcuuaccaugcagaucuacgagggcaagcugaccgccgaggggcuccgcuucggcaucguggccagccgguucaaccacgcgcuggucgaccgccugguggagggggccaucgacgccaucgugcggcacggcgggcgcgaggaggacaucacccucguccgggugcccggcuccugggagaucccgguggccgccggcgagcuggcccgcaaggaggacaucgacgcggucaucgccaucggggugcugauccggggcgccacgccccacuucgacuacaucgccagcgagguguccaaggggcucgcggaccugagccuggagcuccgcaagcccaucaccuucggcgucaucaccgccgacacccuggagcaggccaucgagcgggccgggacgaagcacggcaacaagggcugggaggccgcgcuguccgccaucgagauggccaaccucuucaagagccugcgcggcgggagcggcggguccggcgggagcggcggcuccgggggcgggcaguacaucaaggccaacagcaaguucaucggcaucaccgagcugggcagcggguccggccucgacgggcccuaccagccgacgaccuucaccccgcccaacgacuacuggauccugaucaacagcaacaccaacggcgucguguacgaguccacgaacaacagcgacuucuggaccgccguggucgccaucgagccccacgugaacccgguggaccgccaguacaccaucuucggggaguccaagcaguucaacguccggaacgacagcaacaaguggaaguuccuggagauguuccgcuccagcucccagaacgaguucuacaaccggcgcacccucacgagcgacacccggcuggugggcauccugaaguacggcgggcgcguguggaccuuccacggcgagaccccgcgggccacgaccgacuccagcuccaccgccaaccucaacaacaucagcaucaccauccacuccgaguucuacaucaucccccgcagccaggagagcaagugcaacgaguacaucaacaacgggcugugaggacuaguuauaagacugacuagcccgaugggccucccaacgggcccuccuccccuccuugcaccgagauuaaucaaaggcucuuuucagagccaccaaaaaaaaaaaaaaaaaaaaaaaaaaaaaaaaaaaaaaaaaaaaaaaaaaaaaaaaaaaaaaaaaaaaaaaaaaaaaaaaaaaaaaaaaaaaaaaaaaaaa

SEQ ID NO: 1493 - RNA, 1260 nt, Artificial Sequence
  mRNA product Design i-3 (hSL-A100) comprising derived and/or modified sequence from RVA/Wa/P[8]__AAA47290.1__LumSynt_P2_VP8*(65-223) (opt1)
aggagaaagcuuaccaugcagaucuacgagggcaagcugaccgccgaggggcuccgcuucggcaucguggccagccgguucaaccacgcgcuggucgaccgccugguggagggggccaucgacgccaucgugcggcacggcgggcgcgaggaggacaucacccucguccgggugcccggcuccugggagaucccgguggccgccggcgagcuggcccgcaaggaggacaucgacgcggucaucgccaucggggugcugauccggggcgccacgccccacuucgacuacaucgccagcgagguguccaaggggcucgcggaccugagccuggagcuccgcaagcccaucaccuucggcgucaucaccgccgacacccuggagcaggccaucgagcgggccgggacgaagcacggcaacaagggcugggaggccgcgcuguccgccaucgagauggccaaccucuucaagagccugcgcggcgggagcggcggguccggcgggagcggcggcuccgggggcgggcaguacaucaaggccaacagcaaguucaucggcaucaccgagcugggcagcggguccggccucgacgggcccuaccagccgacgaccuucaccccgcccaacgacuacuggauccugaucaacagcaacaccaacggcgucguguacgaguccacgaacaacagcgacuucuggaccgccguggucgccaucgagccccacgugaaccccguggaccgccaguacaccaucuucggggaguccaagcaguucaacgucagcaacgacuccaacaaguggaaguuccuggagauguuccggagcuccagccagaacgaguucuacaaccgccggacccucacguccgacacccgcuucgugggcauccugaaguacggcgggcggguguggaccuuccacggcgagacgccccgcgccaccaccgacagcuccagcaccgccaaccugaacaacaucuccaucaccauccacagcgaguucuacaucaucccccggagccaggaguccaagugcaacgaguacaucaacaacgggcugugaggacuaguuauaagacugacuagcccgaugggccucccaacgggcccuccuccccuccuugcaccgagauuaaucaaaggcucuuuucagagccaccaaaaaaaaaaaaaaaaaaaaaaaaaaaaaaaaaaaaaaaaaaaaaaaaaaaaaaaaaaaaaaaaaaaaaaaaaaaaaaaaaaaaaaaaaaaaaaaaaaaaa

SEQ ID NO: 1494 - RNA, 1260 nt, Artificial Sequence; identical to SEQ ID NO: 1493
  mRNA product Design i-3 (hSL-A100) comprising derived and/or modified sequence from RVA/Wa/P[8]__AAA66953.1__LumSynt_P2_VP8*(65-223) (opt1)

SEQ ID NO: 1495 - RNA, 1332 nt, Artificial Sequence
  mRNA product Design i-3 (hSL-A100) comprising derived and/or modified sequence from RVA/BE1058/P[4]__AEX30665.1__LumSynt_P2_VP8*(41-223) (opt1)
aggagaaagcuuaccaugcagaucuacgagggcaagcugaccgccgaggggcuccgcuucggcaucguggccagccgguucaaccacgcgcuggucgaccgccugguggagggggccaucgacgccaucgugcggcacggcgggcgcgaggaggacaucacccucguccgggugcccggcuccugggagaucccgguggccgccggcgagcuggcccgcaaggaggacaucgacgcggucaucgccaucggggugcugauccggggcgccacgccccacuucgacuacaucgccagcgagguguccaaggggcucgcggaccugagccuggagcuccgcaagcccaucaccuucggcgucaucaccgccgacacccuggagcaggccaucgagcgggccgggacgaagcacggcaacaagggcugggaggccgcgcuguccgccaucgagauggccaaccucuucaagagccugcgcggcgggagcggcggguccggcgggagcggcggcuccgggggcgggcaguacaucaaggccaacagcaaguucaucggcaucaccgagcugggcagcggguccggcgcccagacccgguacgcgcccgugaacuggggccacggggagaucaacgacagcaccaccgucgagcccgugcucgacggccccuaccagcccacgaccuucaagccgcccaacgacuacuggcugcugaucuccagcaacaccgacgggguggucuacgaguccaccaacaacagcgacuucuggacggccgugaucgccguggagccccacgucaaccagaccaaccgccaguacgugcuguucggcgagaacaagcaguucaacaucgagaacuccagcgacaaguggaaguucuucgagauguucaagggcaacucccagagcgacuucuccaaccggcgcacccugaccagcuccaaccggcugguggggaugcucaaguacggcgggcgcgucuggacguuccacggcgagaccccgcgggccaccaccgacagcuccagcacggccgaccugaacaacaucuccaucaucauccacagcgaguucuacaucaucccccgcagccaggaguccaagugcaacgaguacaucaacaacgggcugugaggacuaguuauaagacugacuagcccgaugggccucccaacgggcccuccuccccuccuugcaccgagauuaaucaaaggcucuuuucagagccaccaaaaaaaaaaaaaaaaaaaaaaaaaaaaaaaaaaaaaaaaaaaaaaaaaaaaaaaaaaaaaaaaaaaaaaaaaaaaaaaaaaaaaaaaaaaaaaaaaaaaa

SEQ ID NO: 1496 - RNA, 1332 nt, Artificial Sequence
  mRNA product Design i-3 (hSL-A100) comprising derived and/or modified sequence from RVA/DS-1/P[4]__CAD62680.1__LumSynt_P2_VP8*(41-223) (opt1)
aggagaaagcuuaccaugcagaucuacgagggcaagcugaccgccgaggggcuccgcuucggcaucguggccagccgguucaaccacgcgcuggucgaccgccugguggagggggccaucgacgccaucgugcggcacggcgggcgcgaggaggacaucacccucguccgggugcccggcuccugggagaucccgguggccgccggcgagcuggcccgcaaggaggacaucgacgcggucaucgccaucggggugcugauccggggcgccacgccccacuucgacuacaucgccagcgagguguccaaggggcucgcggaccugagccuggagcuccgcaagcccaucaccuucggcgucaucaccgccgacacccuggagcaggccaucgagcgggccgggacgaagcacggcaacaagggcugggaggccgcgcuguccgccaucgagauggccaaccucuucaagagccugcgcggcgggagcggcggguccggcgggagcggcggcuccgggggcgggcaguacaucaaggccaacagcaaguucaucggcaucaccgagcugggcagcggguccggcgcccagacccgguacgcgcccgugaacuggggcuccugggagaucaacgacagcaccaccgucgagcccgugcucgacgggcccuaccagccgacgaccuucaagccgcccaacgacuacuggcugcugaucuccagcaacaccaacggcguggucuacgaguccaccaacaacaacgacuucuggacggccgugagcuccguggagccccacgucagccagaccaaccgccaguacauccucuucggggagaacaagcaguucaacguggagaacaacuccgacaaguggaaguucuucgagaccuucaccggcagcucccagggcaacuucagcaaccggcgcacgcugaccuccagcaaccggcugguggggaugcucaaguacggcgggcgcgucuggaccuuccacggcgagacgccccgggccaccaccgacuccagcaacaccgccgaccugaacaacaucagcaucaucauccacuccgaguucuacaucaucccccgcagccaggaguccaagugcaacgaguacaucaacaacgggcugugaggacuaguuauaagacugacuagcccgaugggccucccaacgggcccuccuccccuccuugcaccgagauuaaucaaaggcucuuuucagagccaccaaaaaaaaaaaaaaaaaaaaaaaaaaaaaaaaaaaaaaaaaaaaaaaaaaaaaaaaaaaaaaaaaaaaaaaaaaaaaaaaaaaaaaaaaaaaaaaaaaaaa

SEQ ID NO: 1497 - RNA, 1332 nt, Artificial Sequence; identical to SEQ ID NO: 1496
  mRNA product Design i-3 (hSL-A100) comprising derived and/or modified sequence from RVA/DS-1/P[4]__ABV53252.1__LumSynt_P2_VP8*(41-223) (opt1)

SEQ ID NO: 1498 - RNA, 1332 nt, Artificial Sequence
  mRNA product Design i-3 (hSL-A100) comprising derived and/or modified sequence from RVA/F01322/P[6]__AFA51886.1__LumSynt_P2_VP8*(41-223) (opt1)
aggagaaagcuuaccaugcagaucuacgagggcaagcugaccgccgaggggcuccgcuucggcaucguggccagccgguucaaccacgcgcuggucgaccgccugguggagggggccaucgacgccaucgugcggcacggcgggcgcgaggaggacaucacccucguccgggugcccggcuccugggagaucccgguggccgccggcgagcuggcccgcaaggaggacaucgacgcggucaucgccaucggggugcugauccggggcgccacgccccacuucgacuacaucgccagcgagguguccaaggggcucgcggaccugagccuggagcuccgcaagcccaucaccuucggcgucaucaccgccgacacccuggagcaggccaucgagcgggccgggacgaagcacggcaacaagggcugggaggccgcgcuguccgccaucgagauggccaaccucuucaagagccugcgcggcgggagcggcggguccggcgggagcggcggcuccgggggcgggcaguacaucaaggccaacagcaaguucaucggcaucaccgagcugggcagcggguccggcgcccagaccaacuacgcgcccgugaccuggagccacggcgaggugaacgacuccacgaccaucgagcccguccucgacgggcccuaccagccgaccaacuucaagccgcccaacgacuacuggauccugcugaaccccaccaaccagcagguggugcucgagggcacgaacaagaccgacaucugggucgcccugcugcucguggagccgaacgugaccaaccagagccggcaguacacccuguucggggagacgaagcagaucaccgucgagaacaacaccaacaaguggaaguucuucgagauguuccgcuccagcguguccgccgaguuccagcacaagcggacccugacgagcgacaccaagcucgccggcuucaugaaguucuacaacuccguguggaccuuccacggcgagacccccaacgccacgaccgacuacagcuccaccagcaaccuguucgaggucgagaccgugauccacguggaguucuacaucaucccccgcucccaggagagcaagugcuccgaguacaucaacacggggcugugaggacuaguuauaagacugacuagcccgaugggccucccaacgggcccuccuccccuccuugcaccgagauuaaucaaaggcucuuuucagagccaccaaaaaaaaaaaaaaaaaaaaaaaaaaaaaaaaaaaaaaaaaaaaaaaaaaaaaaaaaaaaaaaaaaaaaaaaaaaaaaaaaaaaaaaaaaaaaaaaaaaaa

SEQ ID NO: 1499 - RNA, 1332 nt, Artificial Sequence
  mRNA product Design i-3 (hSL-A100) comprising derived and/or modified sequence from RVA/1076/P[6]__AAA47337.1__LumSynt_P2_VP8*(41-223) (opt1)
aggagaaagcuuaccaugcagaucuacgagggcaagcugaccgccgaggggcuccgcuucggcaucguggccagccgguucaaccacgcgcuggucgaccgccugguggagggggccaucgacgccaucgugcggcacggcgggcgcgaggaggacaucacccucguccgggugcccggcuccugggagaucccgguggccgccggcgagcuggcccgcaaggaggacaucgacgcggucaucgccaucggggugcugauccggggcgccacgccccacuucgacuacaucgccagcgagguguccaaggggcucgcggaccugagccuggagcuccgcaagcccaucaccuucggcgucaucaccgccgacacccuggagcaggccaucgagcgggccgggacgaagcacggcaacaagggcugggaggccgcgcuguccgccaucgagauggccaaccucuucaagagccugcgcggcgggagcggcggguccggcgggagcggcggcuccgggggcgggcaguacaucaaggccaacagcaaguucaucggcaucaccgagcugggcagcggguccggcgcccagaccaacuacgcgcccgugaccuggagccacggcgaggugaacgacagcacgaccaucgagcccguccucgacgggcccuaccagccgaccuccuucaagccgcccagcgacuacuggauccugcugaaccccaccaaccagcaggucgugcucgagggcacgaacaagaccgacaucuggguggcccugcugcucguggagcccaacgugaccaaccagucccggcaguacacccuguucggggagacgaagcagaucaccgucgagaacaacaccaacaaguggaaguucuucgagauguuccgcagcuccgugagcgccgaguuccagcacaagcggacccugacguccgacaccaagcucgccggcuuccugaaguucuacaacagcguguggaccuucuacggcgagacgccccacgccaccaccgacuacuccagcaccuccaaccugagcgaggucgagaccgcgauccacguggaguucuacaucaucccccgcucccaggagagcaagugcaacgaguacaucaacacggggcugugaggacuaguuauaagacugacuagcccgaugggccucccaacgggcccuccuccccuccuugcaccgagauuaaucaaaggcucuuuucagagccaccaaaaaaaaaaaaaaaaaaaaaaaaaaaaaaaaaaaaaaaaaaaaaaaaaaaaaaaaaaaaaaaaaaaaaaaaaaaaaaaaaaaaaaaaaaaaaaaaaaaaa

SEQ ID NO: 1500 - RNA, 1332 nt, Artificial Sequence
  mRNA product Design i-3 (hSL-A100) comprising derived and/or modified sequence from RVA/BE1128/P[8]__AEX30671.1__LumSynt_P2_VP8*(41-223) (opt1)
aggagaaagcuuaccaugcagaucuacgagggcaagcugaccgccgaggggcuccgcuucggcaucguggccagccgguucaaccacgcgcuggucgaccgccugguggagggggccaucgacgccaucgugcggcacggcgggcgcgaggaggacaucacccucguccgggugcccggcuccugggagaucccgguggccgccggcgagcuggcccgcaaggaggacaucgacgcggucaucgccaucggggugcugauccggggcgccacgccccacuucgacuacaucgccagcgagguguccaaggggcucgcggaccugagccuggagcuccgcaagcccaucaccuucggcgucaucaccgccgacacccuggagcaggccaucgagcgggccgggacgaagcacggcaacaagggcugggaggccgcgcuguccgccaucgagauggccaaccucuucaagagccugcgcggcgggagcggcggguccggcgggagcggcggcuccgggggcgggcaguacaucaaggccaacagcaaguucaucggcaucaccgagcugggcagcggguccggcgcccagacccgguacgcgcccgugaacuggggccacggggagaucaacgacagcaccaccgucgagcccauccucgacggcccguaccagccgacgaccuucaccccgcccaccgacuacuggauccugaucacguccaacaccaacggggugguguacgagagcaccaacaacuccgacuucuggaccgccgucaucgccguggagccccacgugaacccggucgaccgccaguacaacguguucggcgagaacaagcaguucaacgugcggaacgacagcgacaaguggaaguuccuggagauguuccgcggcuccagccagaacgacuucuacaaccggcgcacgcucaccuccgacacccggcuggucgggauccugaaguacggcgggcgcguguggaccuuccacggcgagacgccccgggccaccaccgacagcuccaacaccgccaaccucgacgggaucagcaucacgauccacuccgaguucuacaucaucccccgcagccaggaguccaagugcaacgaguacaucaacaacggccugugaggacuaguuauaagacugacuagcccgaugggccucccaacgggcccuccuccccuccuugcaccgagauuaaucaaaggcucuuuucagagccaccaaaaaaaaaaaaaaaaaaaaaaaaaaaaaaaaaaaaaaaaaaaaaaaaaaaaaaaaaaaaaaaaaaaaaaaaaaaaaaaaaaaaaaaaaaaaaaaaaaaaa

SEQ ID NO: 1501 - RNA, 1332 nt, Artificial Sequence
  mRNA product Design i-3 (hSL-A100) comprising derived and/or modified sequence from RVA/Wa-VirWa/P[8]__ACR22783.1__LumSynt_P2_VP8*(41-223) (opt1)
aggagaaagcuuaccaugcagaucuacgagggcaagcugaccgccgaggggcuccgcuucggcaucguggccagccgguucaaccacgcgcuggucgaccgccugguggagggggccaucgacgccaucgugcggcacggcgggcgcgaggaggacaucacccucguccgggugcccggcuccugggagaucccgguggccgccggcgagcuggcccgcaaggaggacaucgacgcggucaucgccaucggggugcugauccggggcgccacgccccacuucgacuacaucgccagcgagguguccaaggggcucgcggaccugagccuggagcuccgcaagcccaucaccuucggcgucaucaccgccgacacccuggagcaggccaucgagcgggccgggacgaagcacggcaacaagggcugggaggccgcgcuguccgccaucgagauggccaaccucuucaagagccugcgcggcgggagcggcggguccggcgggagcggcggcuccgggggcgggcaguacaucaaggccaacagcaaguucaucggcaucaccgagcugggcagcggguccggcgcccagacccgguacgcgcccgugaacugggggcacggcgagaucaacgacuccaccaccguggagcccauccucgacgggcccuaccagccgacgaccuucaccccgcccaacgacuacuggauccugaucaacagcaacaccaacggcgucguguacgaguccacgaacaacagcgacuucuggaccgccguggucgccaucgagccccacgugaacccgguggaccgccaguacaccaucuucggggaguccaagcaguucaacguccggaacgacagcaacaaguggaaguuccuggagauguuccgcuccagcucccagaacgaguucuacaaccggcgcacccucacgagcgacacccggcuggugggcauccugaaguacggcgggcgcguguggaccuuccacggcgagaccccgcgggccacgaccgacuccagcuccaccgccaaccucaacaacaucagcaucaccauccacuccgaguucuacaucaucccccgcagccaggagagcaagugcaacgaguacaucaacaacgggcugugaggacuaguuauaagacugacuagcccgaugggccucccaacgggcccuccuccccuccuugcaccgagauuaaucaaaggcucuuuucagagccaccaaaaaaaaaaaaaaaaaaaaaaaaaaaaaaaaaaaaaaaaaaaaaaaaaaaaaaaaaaaaaaaaaaaaaaaaaaaaaaaaaaaaaaaaaaaaaaaaaaaaa

SEQ ID NO: 1502 - RNA, 1332 nt, Artificial Sequence
  mRNA product Design i-3 (hSL-A100) comprising derived and/or modified sequence from RVA/Wa/P[8]__AAA47290.1__LumSynt_P2_VP8*(41-223) (opt1)
aggagaaagcuuaccaugcagaucuacgagggcaagcugaccgccgaggggcuccgcuucggcaucguggccagccgguucaaccacgcgcuggucgaccgccugguggagggggccaucgacgccaucgugcggcacggcgggcgcgaggaggacaucacccucguccgggugcccggcuccugggagaucccgguggccgccggcgagcuggcccgcaaggaggacaucgacgcggucaucgccaucggggugcugauccggggcgccacgccccacuucgacuacaucgccagcgagguguccaaggggcucgcggaccugagccuggagcuccgcaagcccaucaccuucggcgucaucaccgccgacacccuggagcaggccaucgagcgggccgggacgaagcacggcaacaagggcugggaggccgcgcuguccgccaucgagauggccaaccucuucaagagccugcgcggcgggagcggcggguccggcgggagcggcggcuccgggggcgggcaguacaucaaggccaacagcaaguucaucggcaucaccgagcugggcagcggguccggcgcccagacccgguacgcgcccgugaacugggggcacggcgagaucaacgacuccaccaccguggagcccauccucgacgggcccuaccagccgacgaccuucaccccgcccaacgacuacuggauccugaucaacagcaacaccaacggcgucguguacgaguccacgaacaacagcgacuucuggaccgccguggucgccaucgagccccacgugaaccccguggaccgccaguacaccaucuucggggaguccaagcaguucaacgucagcaacgacuccaacaaguggaaguuccuggagauguuccggagcuccagccagaacgaguucuacaaccgccggacccucacguccgacacccgcuucgugggcauccugaaguacggcgggcggguguggaccuuccacggcgagacgccccgcgccaccaccgacagcuccagcaccgccaaccugaacaacaucuccaucaccauccacagcgaguucuacaucaucccccggagccaggaguccaagugcaacgaguacaucaacaacgggcugugaggacuaguuauaagacugacuagcccgaugggccucccaacgggcccuccuccccuccuugcaccgagauuaaucaaaggcucuuuucagagccaccaaaaaaaaaaaaaaaaaaaaaaaaaaaaaaaaaaaaaaaaaaaaaaaaaaaaaaaaaaaaaaaaaaaaaaaaaaaaaaaaaaaaaaaaaaaaaaaaaaaaa

SEQ ID NO: 1503 - RNA, 1332 nt, Artificial Sequence
  mRNA product Design i-3 (hSL-A100) comprising derived and/or modified sequence from RVA/Wa/P[8]__AAA66953.1__LumSynt_P2_VP8*(41-223) (opt1)
aggagaaagcuuaccaugcagaucuacgagggcaagcugaccgccgaggggcuccgcuucggcaucguggccagccgguucaaccacgcgcuggucgaccgccugguggagggggccaucgacgccaucgugcggcacggcgggcgcgaggaggacaucacccucguccgggugcccggcuccugggagaucccgguggccgccggcgagcuggcccgcaaggaggacaucgacgcggucaucgccaucggggugcugauccggggcgccacgccccacuucgacuacaucgccagcgagguguccaaggggcucgcggaccugagccuggagcuccgcaagcccaucaccuucggcgucaucaccgccgacacccuggagcaggccaucgagcgggccgggacgaagcacggcaacaagggcugggaggccgcgcuguccgccaucgagauggccaaccucuucaagagccugcgcggcgggagcggcggguccggcgggagcggcggcuccgggggcgggcaguacaucaaggccaacagcaaguucaucggcaucaccgagcugggcagcggguccggcgcccagacccgguacgcgcccgugaacugggggcacggcgagaucaacgacuccaccaccguggagcccaugcucgacgggcccuaccagccgacgaccuucaccccgcccaacgacuacuggauccugaucaacagcaacaccaacggcgucguguacgaguccacgaacaacagcgacuucuggaccgccguggucgccaucgagccccacgugaaccccguggaccgccaguacaccaucuucggggaguccaagcaguucaacgucagcaacgacuccaacaaguggaaguuccuggagauguuccggagcuccagccagaacgaguucuacaaccgccggacccucacguccgacacccgcuucgugggcauccugaaguacggcgggcggguguggaccuuccacggcgagacgccccgcgccaccaccgacagcuccagcaccgccaaccugaacaacaucuccaucaccauccacagcgaguucuacaucaucccccggagccaggaguccaagugcaacgaguacaucaacaacgggcugugaggacuaguuauaagacugacuagcccgaugggccucccaacgggcccuccuccccuccuugcaccgagauuaaucaaaggcucuuuucagagccaccaaaaaaaaaaaaaaaaaaaaaaaaaaaaaaaaaaaaaaaaaaaaaaaaaaaaaaaaaaaaaaaaaaaaaaaaaaaaaaaaaaaaaaaaaaaaaaaaaaaaa

SEQ ID NO: 1504 - RNA, 807 nt, Artificial Sequence
  mRNA product Design i-3 (hSL-A100) comprising derived and/or modified sequence from RVA/BE1058/P[4]__AEX30665.1__SP-IgE_P2_VP8*(65-223) (opt1)
aggagaaagcuuaccauggacuggaccuggauccuguuccucguggccgccgcgacccgcguccacagccaguacaucaaggccaacagcaaguucaucggcaucaccgagcugggcagcggguccggccucgacggccccuaccagcccacgaccuucaagccgcccaacgacuacuggcugcugaucuccagcaacaccgacgggguggucuacgaguccaccaacaacagcgacuucuggacggccgugaucgccguggagccccacgucaaccagaccaaccgccaguacgugcuguucggcgagaacaagcaguucaacaucgagaacuccagcgacaaguggaaguucuucgagauguucaagggcaacucccagagcgacuucuccaaccggcgcacccugaccagcuccaaccggcugguggggaugcucaaguacggcgggcgcgucuggacguuccacggcgagaccccgcgggccaccaccgacagcuccagcacggccgaccugaacaacaucuccaucaucauccacagcgaguucuacaucaucccccgcagccaggaguccaagugcaacgaguacaucaacaacgggcugugaggacuaguuauaagacugacuagcccgaugggccucccaacgggcccuccuccccuccuugcaccgagauuaaucaaaggcucuuuucagagccaccaaaaaaaaaaaaaaaaaaaaaaaaaaaaaaaaaaaaaaaaaaaaaaaaaaaaaaaaaaaaaaaaaaaaaaaaaaaaaaaaaaaaaaaaaaaaaaaaaaaaa

SEQ ID NO: 1505 - RNA, 807 nt, Artificial Sequence
  mRNA product Design i-3 (hSL-A100) comprising derived and/or modified sequence from RVA/DS-1/P[4]__CAD62680.1__SP-IgE_P2_VP8*(65-223) (opt1)
aggagaaagcuuaccauggacuggaccuggauccuguuccucguggccgccgcgacccgcguccacagccaguacaucaaggccaacagcaaguucaucggcaucaccgagcugggcagcggguccggccucgacgggcccuaccagccgacgaccuucaagccgcccaacgacuacuggcugcugaucuccagcaacaccaacggcguggucuacgaguccaccaacaacaacgacuucuggacggccgugagcuccguggagccccacgucagccagaccaaccgccaguacauccucuucggggagaacaagcaguucaacguggagaacaacuccgacaaguggaaguucuucgagaccuucaccggcagcucccagggcaacuucagcaaccggcgcacgcugaccuccagcaaccggcugguggggaugcucaaguacggcgggcgcgucuggaccuuccacggcgagacgccccgggccaccaccgacuccagcaacaccgccgaccugaacaacaucagcaucaucauccacuccgaguucuacaucaucccccgcagccaggaguccaagugcaacgaguacaucaacaacgggcugugaggacuaguuauaagacugacuagcccgaugggccucccaacgggcccuccuccccuccuugcaccgagauuaaucaaaggcucuuuucagagccaccaaaaaaaaaaaaaaaaaaaaaaaaaaaaaaaaaaaaaaaaaaaaaaaaaaaaaaaaaaaaaaaaaaaaaaaaaaaaaaaaaaaaaaaaaaaaaaaaaaaaa

SEQ ID NO: 1506 - RNA, 807 nt, Artificial Sequence; identical to SEQ ID NO: 1505
  mRNA product Design i-3 (hSL-A100) comprising derived and/or modified sequence from RVA/DS-1/P[4]__ABV53252.1__SP-IgE_P2_VP8*(65-223) (opt1)

SEQ ID NO: 1507 - RNA, 807 nt, Artificial Sequence
  mRNA product Design i-3 (hSL-A100) comprising derived and/or modified sequence from RVA/F01322/P[6]__AFA51886.1__SP-IgE_P2_VP8*(65-223) (opt1)
aggagaaagcuuaccauggacuggaccuggauccuguuccucguggccgccgcgacccgcguccacagccaguacaucaaggccaacagcaaguucaucggcaucaccgagcugggcagcggguccggccucgacgggcccuaccagccgaccaacuucaagccgcccaacgacuacuggauccugcugaaccccaccaaccagcagguggugcucgagggcacgaacaagaccgacaucugggucgcccugcugcucguggagccgaacgugaccaaccagagccggcaguacacccuguucggggagacgaagcagaucaccgucgagaacaacaccaacaaguggaaguucuucgagauguuccgcuccagcguguccgccgaguuccagcacaagcggacccugacgagcgacaccaagcucgccggcuucaugaaguucuacaacuccguguggaccuuccacggcgagacccccaacgccacgaccgacuacagcuccaccagcaaccuguucgaggucgagaccgugauccacguggaguucuacaucaucccccgcucccaggagagcaagugcuccgaguacaucaacacggggcugugaggacuaguuauaagacugacuagcccgaugggccucccaacgggcccuccuccccuccuugcaccgagauuaaucaaaggcucuuuucagagccaccaaaaaaaaaaaaaaaaaaaaaaaaaaaaaaaaaaaaaaaaaaaaaaaaaaaaaaaaaaaaaaaaaaaaaaaaaaaaaaaaaaaaaaaaaaaaaaaaaaaaa

SEQ ID NO: 1508 - RNA, 807 nt, Artificial Sequence
  mRNA product Design i-3 (hSL-A100) comprising derived and/or modified sequence from RVA/1076/P[6]__AAA47337.1__SP-IgE_P2_VP8*(65-223) (opt1)
aggagaaagcuuaccauggacuggaccuggauccuguuccucguggccgccgcgacccgcguccacagccaguacaucaaggccaacagcaaguucaucggcaucaccgagcugggcagcggguccggccucgacgggcccuaccagccgaccuccuucaagccgcccagcgacuacuggauccugcugaaccccaccaaccagcaggucgugcucgagggcacgaacaagaccgacaucuggguggcccugcugcucguggagcccaacgugaccaaccagucccggcaguacacccuguucggggagacgaagcagaucaccgucgagaacaacaccaacaaguggaaguucuucgagauguuccgcagcuccgugagcgccgaguuccagcacaagcggacccugacguccgacaccaagcucgccggcuuccugaaguucuacaacagcguguggaccuucuacggcgagacgccccacgccaccaccgacuacuccagcaccuccaaccugagcgaggucgagaccgcgauccacguggaguucuacaucaucccccgcucccaggagagcaagugcaacgaguacaucaacacggggcugugaggacuaguuauaagacugacuagcccgaugggccucccaacgggcccuccuccccuccuugcaccgagauuaaucaaaggcucuuuucagagccaccaaaaaaaaaaaaaaaaaaaaaaaaaaaaaaaaaaaaaaaaaaaaaaaaaaaaaaaaaaaaaaaaaaaaaaaaaaaaaaaaaaaaaaaaaaaaaaaaaaaaa

SEQ ID NO: 1509 - RNA, 807 nt, Artificial Sequence
  mRNA product Design i-3 (hSL-A100) comprising derived and/or modified sequence from RVA/BE1128/P[8]__AEX30671.1__SP-IgE_P2_VP8*(65-223) (opt1)
aggagaaagcuuaccauggacuggaccuggauccuguuccucguggccgccgcgacccgcguccacagccaguacaucaaggccaacagcaaguucaucggcaucaccgagcugggcagcggguccggccucgacggcccguaccagccgacgaccuucaccccgcccaccgacuacuggauccugaucacguccaacaccaacggggugguguacgagagcaccaacaacuccgacuucuggaccgccgucaucgccguggagccccacgugaacccggucgaccgccaguacaacguguucggcgagaacaagcaguucaacgugcggaacgacagcgacaaguggaaguuccuggagauguuccgcggcuccagccagaacgacuucuacaaccggcgcacgcucaccuccgacacccggcuggucgggauccugaaguacggcgggcgcguguggaccuuccacggcgagacgccccgggccaccaccgacagcuccaacaccgccaaccucgacgggaucagcaucacgauccacuccgaguucuacaucaucccccgcagccaggaguccaagugcaacgaguacaucaacaacggccugugaggacuaguuauaagacugacuagcccgaugggccucccaacgggcccuccuccccuccuugcaccgagauuaaucaaaggcucuuuucagagccaccaaaaaaaaaaaaaaaaaaaaaaaaaaaaaaaaaaaaaaaaaaaaaaaaaaaaaaaaaaaaaaaaaaaaaaaaaaaaaaaaaaaaaaaaaaaaaaaaaaaaa

SEQ ID NO: 1510 - RNA, 807 nt, Artificial Sequence
  mRNA product Design i-3 (hSL-A100) comprising derived and/or modified sequence from RVA/Wa-VirWa/P[8]__ACR22783.1__SP-IgE_P2_VP8*(65-223) (opt1)
aggagaaagcuuaccauggacuggaccuggauccuguuccucguggccgccgcgacccgcguccacagccaguacaucaaggccaacagcaaguucaucggcaucaccgagcugggcagcggguccggccucgacgggcccuaccagccgacgaccuucaccccgcccaacgacuacuggauccugaucaacagcaacaccaacggcgucguguacgaguccacgaacaacagcgacuucuggaccgccguggucgccaucgagccccacgugaacccgguggaccgccaguacaccaucuucggggaguccaagcaguucaacguccggaacgacagcaacaaguggaaguuccuggagauguuccgcuccagcucccagaacgaguucuacaaccggcgcacccucacgagcgacacccggcuggugggcauccugaaguacggcgggcgcguguggaccuuccacggcgagaccccgcgggccacgaccgacuccagcuccaccgccaaccucaacaacaucagcaucaccauccacuccgaguucuacaucaucccccgcagccaggagagcaagugcaacgaguacaucaacaacgggcugugaggacuaguuauaagacugacuagcccgaugggccucccaacgggcccuccuccccuccuugcaccgagauuaaucaaaggcucuuuucagagccaccaaaaaaaaaaaaaaaaaaaaaaaaaaaaaaaaaaaaaaaaaaaaaaaaaaaaaaaaaaaaaaaaaaaaaaaaaaaaaaaaaaaaaaaaaaaaaaaaaaaaa

SEQ ID NO: 1511 - RNA, 807 nt, Artificial Sequence
  mRNA product Design i-3 (hSL-A100) comprising derived and/or modified sequence from RVA/Wa/P[8]__AAA47290.1__SP-IgE_P2_VP8*(65-223) (opt1)
aggagaaagcuuaccauggacuggaccuggauccuguuccucguggccgccgcgacccgcguccacagccaguacaucaaggccaacagcaaguucaucggcaucaccgagcugggcagcggguccggccucgacgggcccuaccagccgacgaccuucaccccgcccaacgacuacuggauccugaucaacagcaacaccaacggcgucguguacgaguccacgaacaacagcgacuucuggaccgccguggucgccaucgagccccacgugaaccccguggaccgccaguacaccaucuucggggaguccaagcaguucaacgucagcaacgacuccaacaaguggaaguuccuggagauguuccggagcuccagccagaacgaguucuacaaccgccggacccucacguccgacacccgcuucgugggcauccugaaguacggcgggcggguguggaccuuccacggcgagacgccccgcgccaccaccgacagcuccagcaccgccaaccugaacaacaucuccaucaccauccacagcgaguucuacaucaucccccggagccaggaguccaagugcaacgaguacaucaacaacgggcugugaggacuaguuauaagacugacuagcccgaugggccucccaacgggcccuccuccccuccuugcaccgagauuaaucaaaggcucuuuucagagccaccaaaaaaaaaaaaaaaaaaaaaaaaaaaaaaaaaaaaaaaaaaaaaaaaaaaaaaaaaaaaaaaaaaaaaaaaaaaaaaaaaaaaaaaaaaaaaaaaaaaaa

SEQ ID NO: 1512 - RNA, 807 nt, Artificial Sequence; identical to SEQ ID NO: 1511
  mRNA product Design i-3 (hSL-A100) comprising derived and/or modified sequence from RVA/Wa/P[8]__AAA66953.1__SP-IgE_P2_VP8*(65-223) (opt1)

SEQ ID NO: 1513 - RNA, 879 nt, Artificial Sequence
  mRNA product Design i-3 (hSL-A100) comprising derived and/or modified sequence from RVA/BE1058/P[4]__AEX30665.1__SP-IgE_P2_VP8*(41-223) (opt1)
aggagaaagcuuaccauggacuggaccuggauccuguuccucguggccgccgcgacccgcguccacagccaguacaucaaggccaacagcaaguucaucggcaucaccgagcugggcagcggguccggcgcccagacccgguacgcgcccgugaacuggggccacggggagaucaacgacagcaccaccgucgagcccgugcucgacggccccuaccagcccacgaccuucaagccgcccaacgacuacuggcugcugaucuccagcaacaccgacgggguggucuacgaguccaccaacaacagcgacuucuggacggccgugaucgccguggagccccacgucaaccagaccaaccgccaguacgugcuguucggcgagaacaagcaguucaacaucgagaacuccagcgacaaguggaaguucuucgagauguucaagggcaacucccagagcgacuucuccaaccggcgcacccugaccagcuccaaccggcugguggggaugcucaaguacggcgggcgcgucuggacguuccacggcgagaccccgcgggccaccaccgacagcuccagcacggccgaccugaacaacaucuccaucaucauccacagcgaguucuacaucaucccccgcagccaggaguccaagugcaacgaguacaucaacaacgggcugugaggacuaguuauaagacugacuagcccgaugggccucccaacgggcccuccuccccuccuugcaccgagauuaaucaaaggcucuuuucagagccaccaaaaaaaaaaaaaaaaaaaaaaaaaaaaaaaaaaaaaaaaaaaaaaaaaaaaaaaaaaaaaaaaaaaaaaaaaaaaaaaaaaaaaaaaaaaaaaaaaaaaa

SEQ ID NO: 1514 - RNA, 879 nt, Artificial Sequence
  mRNA product Design i-3 (hSL-A100) comprising derived and/or modified sequence from RVA/DS-1/P[4]__CAD62680.1__SP-IgE_P2_VP8*(41-223) (opt1)
aggagaaagcuuaccauggacuggaccuggauccuguuccucguggccgccgcgacccgcguccacagccaguacaucaaggccaacagcaaguucaucggcaucaccgagcugggcagcggguccggcgcccagacccgguacgcgcccgugaacuggggcuccugggagaucaacgacagcaccaccgucgagcccgugcucgacgggcccuaccagccgacgaccuucaagccgcccaacgacuacuggcugcugaucuccagcaacaccaacggcguggucuacgaguccaccaacaacaacgacuucuggacggccgugagcuccguggagccccacgucagccagaccaaccgccaguacauccucuucggggagaacaagcaguucaacguggagaacaacuccgacaaguggaaguucuucgagaccuucaccggcagcucccagggcaacuucagcaaccggcgcacgcugaccuccagcaaccggcugguggggaugcucaaguacggcgggcgcgucuggaccuuccacggcgagacgccccgggccaccaccgacuccagcaacaccgccgaccugaacaacaucagcaucaucauccacuccgaguucuacaucaucccccgcagccaggaguccaagugcaacgaguacaucaacaacgggcugugaggacuaguuauaagacugacuagcccgaugggccucccaacgggcccuccuccccuccuugcaccgagauuaaucaaaggcucuuuucagagccaccaaaaaaaaaaaaaaaaaaaaaaaaaaaaaaaaaaaaaaaaaaaaaaaaaaaaaaaaaaaaaaaaaaaaaaaaaaaaaaaaaaaaaaaaaaaaaaaaaaaaa

SEQ ID NO: 1515 - RNA, 879 nt, Artificial Sequence; identical to SEQ ID NO: 1514
  mRNA product Design i-3 (hSL-A100) comprising derived and/or modified sequence from RVA/DS-1/P[4]__ABV53252.1__SP-IgE_P2_VP8*(41-223) (opt1)

SEQ ID NO: 1516 - RNA, 879 nt, Artificial Sequence
  mRNA product Design i-3 (hSL-A100) comprising derived and/or modified sequence from RVA/F01322/P[6]__AFA51886.1__SP-IgE_P2_VP8*(41-223) (opt1)
aggagaaagcuuaccauggacuggaccuggauccuguuccucguggccgccgcgacccgcguccacagccaguacaucaaggccaacagcaaguucaucggcaucaccgagcugggcagcggguccggcgcccagaccaacuacgcgcccgugaccuggagccacggcgaggugaacgacuccacgaccaucgagcccguccucgacgggcccuaccagccgaccaacuucaagccgcccaacgacuacuggauccugcugaaccccaccaaccagcagguggugcucgagggcacgaacaagaccgacaucugggucgcccugcugcucguggagccgaacgugaccaaccagagccggcaguacacccuguucggggagacgaagcagaucaccgucgagaacaacaccaacaaguggaaguucuucgagauguuccgcuccagcguguccgccgaguuccagcacaagcggacccugacgagcgacaccaagcucgccggcuucaugaaguucuacaacuccguguggaccuuccacggcgagacccccaacgccacgaccgacuacagcuccaccagcaaccuguucgaggucgagaccgugauccacguggaguucuacaucaucccccgcucccaggagagcaagugcuccgaguacaucaacacggggcugugaggacuaguuauaagacugacuagcccgaugggccucccaacgggcccuccuccccuccuugcaccgagauuaaucaaaggcucuuuucagagccaccaaaaaaaaaaaaaaaaaaaaaaaaaaaaaaaaaaaaaaaaaaaaaaaaaaaaaaaaaaaaaaaaaaaaaaaaaaaaaaaaaaaaaaaaaaaaaaaaaaaaa

SEQ ID NO: 1517 - RNA, 879 nt, Artificial Sequence
  mRNA product Design i-3 (hSL-A100) comprising derived and/or modified sequence from RVA/1076/P[6]__AAA47337.1__SP-IgE_P2_VP8*(41-223) (opt1)
aggagaaagcuuaccauggacuggaccuggauccuguuccucguggccgccgcgacccgcguccacagccaguacaucaaggccaacagcaaguucaucggcaucaccgagcugggcagcggguccggcgcccagaccaacuacgcgcccgugaccuggagccacggcgaggugaacgacagcacgaccaucgagcccguccucgacgggcccuaccagccgaccuccuucaagccgcccagcgacuacuggauccugcugaaccccaccaaccagcaggucgugcucgagggcacgaacaagaccgacaucuggguggcccugcugcucguggagcccaacgugaccaaccagucccggcaguacacccuguucggggagacgaagcagaucaccgucgagaacaacaccaacaaguggaaguucuucgagauguuccgcagcuccgugagcgccgaguuccagcacaagcggacccugacguccgacaccaagcucgccggcuuccugaaguucuacaacagcguguggaccuucuacggcgagacgccccacgccaccaccgacuacuccagcaccuccaaccugagcgaggucgagaccgcgauccacguggaguucuacaucaucccccgcucccaggagagcaagugcaacgaguacaucaacacggggcugugaggacuaguuauaagacugacuagcccgaugggccucccaacgggcccuccuccccuccuugcaccgagauuaaucaaaggcucuuuucagagccaccaaaaaaaaaaaaaaaaaaaaaaaaaaaaaaaaaaaaaaaaaaaaaaaaaaaaaaaaaaaaaaaaaaaaaaaaaaaaaaaaaaaaaaaaaaaaaaaaaaaaa

SEQ ID NO: 1518 - RNA, 879 nt, Artificial Sequence
  mRNA product Design i-3 (hSL-A100) comprising derived and/or modified sequence from RVA/BE1128/P[8]__AEX30671.1__SP-IgE_P2_VP8*(41-223) (opt1)
aggagaaagcuuaccauggacuggaccuggauccuguuccucguggccgccgcgacccgcguccacagccaguacaucaaggccaacagcaaguucaucggcaucaccgagcugggcagcggguccggcgcccagacccgguacgcgcccgugaacuggggccacggggagaucaacgacagcaccaccgucgagcccauccucgacggcccguaccagccgacgaccuucaccccgcccaccgacuacuggauccugaucacguccaacaccaacggggugguguacgagagcaccaacaacuccgacuucuggaccgccgucaucgccguggagccccacgugaacccggucgaccgccaguacaacguguucggcgagaacaagcaguucaacgugcggaacgacagcgacaaguggaaguuccuggagauguuccgcggcuccagccagaacgacuucuacaaccggcgcacgcucaccuccgacacccggcuggucgggauccugaaguacggcgggcgcguguggaccuuccacggcgagacgccccgggccaccaccgacagcuccaacaccgccaaccucgacgggaucagcaucacgauccacuccgaguucuacaucaucccccgcagccaggaguccaagugcaacgaguacaucaacaacggccugugaggacuaguuauaagacugacuagcccgaugggccucccaacgggcccuccuccccuccuugcaccgagauuaaucaaaggcucuuuucagagccaccaaaaaaaaaaaaaaaaaaaaaaaaaaaaaaaaaaaaaaaaaaaaaaaaaaaaaaaaaaaaaaaaaaaaaaaaaaaaaaaaaaaaaaaaaaaaaaaaaaaaa

SEQ ID NO: 1519 - RNA, 879 nt, Artificial Sequence
  mRNA product Design i-3 (hSL-A100) comprising derived and/or modified sequence from RVA/Wa-VirWa/P[8]__ACR22783.1__SP-IgE_P2_VP8*(41-223) (opt1)
aggagaaagcuuaccauggacuggaccuggauccuguuccucguggccgccgcgacccgcguccacagccaguacaucaaggccaacagcaaguucaucggcaucaccgagcugggcagcggguccggcgcccagacccgguacgcgcccgugaacugggggcacggcgagaucaacgacuccaccaccguggagcccauccucgacgggcccuaccagccgacgaccuucaccccgcccaacgacuacuggauccugaucaacagcaacaccaacggcgucguguacgaguccacgaacaacagcgacuucuggaccgccguggucgccaucgagccccacgugaacccgguggaccgccaguacaccaucuucggggaguccaagcaguucaacguccggaacgacagcaacaaguggaaguuccuggagauguuccgcuccagcucccagaacgaguucuacaaccggcgcacccucacgagcgacacccggcuggugggcauccugaaguacggcgggcgcguguggaccuuccacggcgagaccccgcgggccacgaccgacuccagcuccaccgccaaccucaacaacaucagcaucaccauccacuccgaguucuacaucaucccccgcagccaggagagcaagugcaacgaguacaucaacaacgggcugugaggacuaguuauaagacugacuagcccgaugggccucccaacgggcccuccuccccuccuugcaccgagauuaaucaaaggcucuuuucagagccaccaaaaaaaaaaaaaaaaaaaaaaaaaaaaaaaaaaaaaaaaaaaaaaaaaaaaaaaaaaaaaaaaaaaaaaaaaaaaaaaaaaaaaaaaaaaaaaaaaaaaa

SEQ ID NO: 1520 - RNA, 879 nt, Artificial Sequence
  mRNA product Design i-3 (hSL-A100) comprising derived and/or modified sequence from RVA/Wa/P[8]__AAA47290.1__SP-IgE_P2_VP8*(41-223) (opt1)
aggagaaagcuuaccauggacuggaccuggauccuguuccucguggccgccgcgacccgcguccacagccaguacaucaaggccaacagcaaguucaucggcaucaccgagcugggcagcggguccggcgcccagacccgguacgcgcccgugaacugggggcacggcgagaucaacgacuccaccaccguggagcccauccucgacgggcccuaccagccgacgaccuucaccccgcccaacgacuacuggauccugaucaacagcaacaccaacggcgucguguacgaguccacgaacaacagcgacuucuggaccgccguggucgccaucgagccccacgugaaccccguggaccgccaguacaccaucuucggggaguccaagcaguucaacgucagcaacgacuccaacaaguggaaguuccuggagauguuccggagcuccagccagaacgaguucuacaaccgccggacccucacguccgacacccgcuucgugggcauccugaaguacggcgggcggguguggaccuuccacggcgagacgccccgcgccaccaccgacagcuccagcaccgccaaccugaacaacaucuccaucaccauccacagcgaguucuacaucaucccccggagccaggaguccaagugcaacgaguacaucaacaacgggcugugaggacuaguuauaagacugacuagcccgaugggccucccaacgggcccuccuccccuccuugcaccgagauuaaucaaaggcucuuuucagagccaccaaaaaaaaaaaaaaaaaaaaaaaaaaaaaaaaaaaaaaaaaaaaaaaaaaaaaaaaaaaaaaaaaaaaaaaaaaaaaaaaaaaaaaaaaaaaaaaaaaaaa

SEQ ID NO: 1521 - RNA, 879 nt, Artificial Sequence
  mRNA product Design i-3 (hSL-A100) comprising derived and/or modified sequence from RVA/Wa/P[8]__AAA66953.1__SP-IgE_P2_VP8*(41-223) (opt1)
aggagaaagcuuaccauggacuggaccuggauccuguuccucguggccgccgcgacccgcguccacagccaguacaucaaggccaacagcaaguucaucggcaucaccgagcugggcagcggguccggcgcccagacccgguacgcgcccgugaacugggggcacggcgagaucaacgacuccaccaccguggagcccaugcucgacgggcccuaccagccgacgaccuucaccccgcccaacgacuacuggauccugaucaacagcaacaccaacggcgucguguacgaguccacgaacaacagcgacuucuggaccgccguggucgccaucgagccccacgugaaccccguggaccgccaguacaccaucuucggggaguccaagcaguucaacgucagcaacgacuccaacaaguggaaguuccuggagauguuccggagcuccagccagaacgaguucuacaaccgccggacccucacguccgacacccgcuucgugggcauccugaaguacggcgggcggguguggaccuuccacggcgagacgccccgcgccaccaccgacagcuccagcaccgccaaccugaacaacaucuccaucaccauccacagcgaguucuacaucaucccccggagccaggaguccaagugcaacgaguacaucaacaacgggcugugaggacuaguuauaagacugacuagcccgaugggccucccaacgggcccuccuccccuccuugcaccgagauuaaucaaaggcucuuuucagagccaccaaaaaaaaaaaaaaaaaaaaaaaaaaaaaaaaaaaaaaaaaaaaaaaaaaaaaaaaaaaaaaaaaaaaaaaaaaaaaaaaaaaaaaaaaaaaaaaaaaaaa

SEQ ID NO: 1522 - RNA, 756 nt, Artificial Sequence
  mRNA product Design i-3 (hSL-A100) comprising derived and/or modified sequence from RVA/BE1058/P[4]__AEX30665.1__P2_VP8*(65-223) (opt1)
aggagaaagcuuaccaugcaguacaucaaggccaacagcaaguucaucggcaucaccgagcugggguccggcagcgggcucgacggccccuaccagccgaccacguucaagccgcccaacgacuacuggcugcugaucuccagcaacaccgacgggguggucuacgaguccaccaacaacagcgacuucuggaccgccgugaucgcgguggagccccacgucaaccagacgaaccgccaguacguccucuucggcgagaacaagcaguucaacaucgagaacuccagcgacaaguggaaguucuucgagauguucaagggcaacucccagagcgacuucuccaaccggcgcacccugaccagcuccaaccggcugguggggaugcucaaguacggcgggcgcguguggaccuuccacggcgagacgccccgggccaccaccgacagcuccagcaccgccgaccugaacaacaucuccaucaucauccacagcgaguucuacaucaucccccgcucccaggagagcaagugcaacgaguacaucaacaacgggcugugaggacuaguuauaagacugacuagcccgaugggccucccaacgggcccuccuccccuccuugcaccgagauuaaucaaaggcucuuuucagagccaccaaaaaaaaaaaaaaaaaaaaaaaaaaaaaaaaaaaaaaaaaaaaaaaaaaaaaaaaaaaaaaaaaaaaaaaaaaaaaaaaaaaaaaaaaaaaaaaaaaaaa

SEQ ID NO: 1523 - RNA, 756 nt, Artificial Sequence
  mRNA product Design i-3 (hSL-A100) comprising derived and/or modified sequence from RVA/DS-1/P[4]__CAD62680.1__P2_VP8*(65-223) (opt1)
aggagaaagcuuaccaugcaguacaucaaggccaacagcaaguucaucggcaucaccgagcugggguccggcagcgggcucgacggccccuaccagccgaccacguucaagccgcccaacgacuacuggcugcugaucuccagcaacaccaacgggguggucuacgaguccaccaacaacaacgacuucuggaccgccgugagcuccguggagccccacgucagccagacgaaccgccaguacauccucuucggcgagaacaagcaguucaacguggagaacaacuccgacaaguggaaguucuucgagaccuucaccggcagcucccaggggaacuucagcaaccggcgcacccugacguccagcaaccggcuggugggcaugcucaaguacgggggccgcgucuggaccuuccacggggagacgccccgggcgaccaccgacuccagcaacaccgccgaccugaacaacaucuccaucaucauccacagcgaguucuacaucaucccccgcucccaggagagcaagugcaacgaguacaucaacaacggccugugaggacuaguuauaagacugacuagcccgaugggccucccaacgggcccuccuccccuccuugcaccgagauuaaucaaaggcucuuuucagagccaccaaaaaaaaaaaaaaaaaaaaaaaaaaaaaaaaaaaaaaaaaaaaaaaaaaaaaaaaaaaaaaaaaaaaaaaaaaaaaaaaaaaaaaaaaaaaaaaaaaaaa

SEQ ID NO: 1524 - RNA, 756 nt, Artificial Sequence; identical to SEQ ID NO: 1523
  mRNA product Design i-3 (hSL-A100) comprising derived and/or modified sequence from RVA/DS-1/P[4]__ABV53252.1__P2_VP8*(65-223) (opt1)

SEQ ID NO: 1525 - RNA, 756 nt, Artificial Sequence
  mRNA product Design i-3 (hSL-A100) comprising derived and/or modified sequence from RVA/F01322/P[6]__AFA51886.1__P2_VP8*(65-223) (opt1)
aggagaaagcuuaccaugcaguacaucaaggccaacagcaaguucaucggcaucaccgagcugggguccggcagcgggcucgacggccccuaccagccgaccaacuucaagccgcccaacgacuacuggauccugcugaaccccacgaaccagcaggucgugcucgaggggaccaacaagaccgacaucuggguggcccugcugcucguggagcccaacgucaccaaccagucccgccaguacacgcuguucggcgagaccaagcagaucaccguggagaacaacaccaacaaguggaaguucuucgagauguuccggagcuccgugagcgcggaguuccagcacaagcgcacgcugaccuccgacaccaagcucgccggcuucaugaaguucuacaacagcgucuggaccuuccacggggagacgcccaacgccaccaccgacuacuccagcaccuccaaccuguucgagguggagacggugauccacgucgaguucuacaucaucccccggagccaggaguccaagugcagcgaguacaucaacaccggccugugaggacuaguuauaagacugacuagcccgaugggccucccaacgggcccuccuccccuccuugcaccgagauuaaucaaaggcucuuuucagagccaccaaaaaaaaaaaaaaaaaaaaaaaaaaaaaaaaaaaaaaaaaaaaaaaaaaaaaaaaaaaaaaaaaaaaaaaaaaaaaaaaaaaaaaaaaaaaaaaaaaaaa

SEQ ID NO: 1526 - RNA, 756 nt, Artificial Sequence
  mRNA product Design i-3 (hSL-A100) comprising derived and/or modified sequence from RVA/1076/P[6]__AAA47337.1__P2_VP8*(65-223) (opt1)
aggagaaagcuuaccaugcaguacaucaaggccaacagcaaguucaucggcaucaccgagcugggguccggcagcgggcucgacggccccuaccagccgaccuccuucaagccgcccagcgacuacuggauccugcugaaccccacgaaccagcaggucgugcucgaggggaccaacaagaccgacaucuggguggcccugcugcucguggagcccaacgucaccaaccagucccgccaguacacgcuguucggcgagaccaagcagaucaccguggagaacaacaccaacaaguggaaguucuucgagauguuccggagcuccgugagcgcggaguuccagcacaagcgcacgcugaccuccgacaccaagcucgccggcuuccugaaguucuacaacagcgucuggaccuucuacggggagacgccccacgccaccaccgacuacuccagcaccuccaaccugagcgagguggagacggccauccacguggaguucuacaucaucccccggucccaggagagcaagugcaacgaguacaucaacaccggccucugaggacuaguuauaagacugacuagcccgaugggccucccaacgggcccuccuccccuccuugcaccgagauuaaucaaaggcucuuuucagagccaccaaaaaaaaaaaaaaaaaaaaaaaaaaaaaaaaaaaaaaaaaaaaaaaaaaaaaaaaaaaaaaaaaaaaaaaaaaaaaaaaaaaaaaaaaaaaaaaaaaaaa

SEQ ID NO: 1527 - RNA, 756 nt, Artificial Sequence
  mRNA product Design i-3 (hSL-A100) comprising derived and/or modified sequence from RVA/BE1128/P[8]__AEX30671.1__P2_VP8*(65-223) (opt1)
aggagaaagcuuaccaugcaguacaucaaggccaacagcaaguucaucggcaucaccgagcugggguccggcagcgggcucgacggccccuaccagccgaccacguucaccccgcccaccgacuacuggauccugaucaccuccaacacgaacgggguggucuacgagagcaccaacaacuccgacuucuggaccgccgugaucgcgguggagccccacgucaaccccguggaccgccaguacaacguguucggcgagaacaagcaguucaacguccggaacgacagcgacaaguggaaguuccuggagauguuccgcggcuccagccagaacgacuucuacaaccggcgcacccucacguccgacacccggcugguggggauccugaaguacggcgggcgcguguggaccuuccacggcgagacgccccgggccaccaccgacagcuccaacaccgccaaccucgacgggaucagcaucaccauccacuccgaguucuacaucaucccccgcagccaggaguccaagugcaacgaguacaucaacaacggccugugaggacuaguuauaagacugacuagcccgaugggccucccaacgggcccuccuccccuccuugcaccgagauuaaucaaaggcucuuuucagagccaccaaaaaaaaaaaaaaaaaaaaaaaaaaaaaaaaaaaaaaaaaaaaaaaaaaaaaaaaaaaaaaaaaaaaaaaaaaaaaaaaaaaaaaaaaaaaaaaaaaaaa

SEQ ID NO: 1528 - RNA, 756 nt, Artificial Sequence
  mRNA product Design i-3 (hSL-A100) comprising derived and/or modified sequence from RVA/Wa-VirWa/P[8]__ACR22783.1__P2_VP8*(65-223) (opt1)
aggagaaagcuuaccaugcaguacaucaaggccaacagcaaguucaucggcaucaccgagcugggguccggcagcgggcucgacggccccuaccagccgaccacguucaccccgcccaacgacuacuggauccugaucaacuccaacaccaacgggguggucuacgagagcaccaacaacuccgacuucuggacggccgugguggcgaucgagccccacgucaaccccguggaccgccaguacaccaucuucggcgagagcaagcaguucaacgugcggaacgacuccaacaaguggaaguuccuggagauguuccgcagcuccagccagaacgaguucuacaaccggcgcacccucaccuccgacacgcggcuggucggcauccugaaguacgggggccgcguguggaccuuccacggggagacgccccgggccaccaccgacagcuccagcaccgccaaccucaacaacaucuccaucaccauccacagcgaguucuacaucaucccccgcucccaggagagcaagugcaacgaguacaucaacaacggccugugaggacuaguuauaagacugacuagcccgaugggccucccaacgggcccuccuccccuccuugcaccgagauuaaucaaaggcucuuuucagagccaccaaaaaaaaaaaaaaaaaaaaaaaaaaaaaaaaaaaaaaaaaaaaaaaaaaaaaaaaaaaaaaaaaaaaaaaaaaaaaaaaaaaaaaaaaaaaaaaaaaaaa

SEQ ID NO: 1529 - RNA, 756 nt, Artificial Sequence
  mRNA product Design i-3 (hSL-A100) comprising derived and/or modified sequence from RVA/Wa/P[8]__AAA47290.1__P2_VP8*(65-223) (opt1)
aggagaaagcuuaccaugcaguacaucaaggccaacagcaaguucaucggcaucaccgagcugggguccggcagcgggcucgacggccccuaccagccgaccacguucaccccgcccaacgacuacuggauccugaucaacuccaacaccaacgggguggucuacgagagcaccaacaacuccgacuucuggacggccgugguggcgaucgagccccacgucaaccccguggaccgccaguacaccaucuucggcgagagcaagcaguucaacguguccaacgacagcaacaaguggaaguuccuggagauguuccgguccagcucccagaacgaguucuacaaccgccggacccucaccagcgacacgcgcuucgucggcauccugaaguacgggggccggguguggaccuuccacggggagacgccccgcgccaccaccgacuccagcuccaccgccaaccugaacaacaucagcaucaccauccacuccgaguucuacaucaucccccggagccaggaguccaagugcaacgaguacaucaacaacggccucugaggacuaguuauaagacugacuagcccgaugggccucccaacgggcccuccuccccuccuugcaccgagauuaaucaaaggcucuuuucagagccaccaaaaaaaaaaaaaaaaaaaaaaaaaaaaaaaaaaaaaaaaaaaaaaaaaaaaaaaaaaaaaaaaaaaaaaaaaaaaaaaaaaaaaaaaaaaaaaaaaaaaa

SEQ ID NO: 1530 - RNA, 756 nt, Artificial Sequence; identical to SEQ ID NO: 1529
  mRNA product Design i-3 (hSL-A100) comprising derived and/or modified sequence from RVA/Wa/P[8]__AAA66953.1__P2_VP8*(65-223) (opt1)

SEQ ID NO: 1531 - RNA, 828 nt, Artificial Sequence
  mRNA product Design i-3 (hSL-A100) comprising derived and/or modified sequence from RVA/BE1058/P[4]__AEX30665.1__P2_VP8*(41-223) (opt1)
aggagaaagcuuaccaugcaguacaucaaggccaacagcaaguucaucggcaucaccgagcugggguccggcagcggggcccagacccgcuacgcgcccgugaacuggggccacggggagaucaacgacuccacgaccgucgagccggugcucgacggccccuaccagcccaccaccuucaagcccccgaacgacuacuggcugcugaucagcuccaacacggacggcguggucuacgagagcaccaacaacuccgacuucuggaccgccgugaucgccguggagccccacgucaaccagaccaaccggcaguacguccucuucggggagaacaagcaguucaacaucgagaacagcuccgacaaguggaaguucuucgagauguucaagggcaacagccaguccgacuucagcaaccgccggacgcugaccuccagcaaccgccugguggggaugcucaaguacggcgggcggguguggaccuuccacggcgagacgccccgcgccaccaccgacuccagcuccaccgccgaccugaacaacaucagcaucaucauccacuccgaguucuacaucaucccccggagccaggagagcaagugcaacgaguacaucaacaacggccugugaggacuaguuauaagacugacuagcccgaugggccucccaacgggcccuccuccccuccuugcaccgagauuaaucaaaggcucuuuucagagccaccaaaaaaaaaaaaaaaaaaaaaaaaaaaaaaaaaaaaaaaaaaaaaaaaaaaaaaaaaaaaaaaaaaaaaaaaaaaaaaaaaaaaaaaaaaaaaaaaaaaaa

SEQ ID NO: 1532 - RNA, 828 nt, Artificial Sequence
  mRNA product Design i-3 (hSL-A100) comprising derived and/or modified sequence from RVA/DS-1/P[4]__CAD62680.1__P2_VP8*(41-223) (opt1)
aggagaaagcuuaccaugcaguacaucaaggccaacagcaaguucaucggcaucaccgagcugggguccggcagcggggcccagacccgcuacgcgcccgugaacuggggcuccugggagaucaacgacagcacgaccgucgagccggugcucgacgggcccuaccagcccaccaccuucaagcccccgaacgacuacuggcugcugaucuccagcaacacgaacggcguggucuacgaguccaccaacaacaacgacuucuggaccgccgugagcuccguggagccccacgucagccagaccaaccggcaguacauccucuucggcgagaacaagcaguucaacguggagaacaacuccgacaaguggaaguucuucgagacguucaccgggagcucccagggcaacuucagcaaccgccggacccugaccuccagcaaccgccugguggggaugcucaaguacggcgggcgggucuggacguuccacggcgagacgccccgcgccaccaccgacuccagcaacaccgccgaccugaacaacaucuccaucaucauccacagcgaguucuacaucaucccccggagccaggaguccaagugcaacgaguacaucaacaacggccugugaggacuaguuauaagacugacuagcccgaugggccucccaacgggcccuccuccccuccuugcaccgagauuaaucaaaggcucuuuucagagccaccaaaaaaaaaaaaaaaaaaaaaaaaaaaaaaaaaaaaaaaaaaaaaaaaaaaaaaaaaaaaaaaaaaaaaaaaaaaaaaaaaaaaaaaaaaaaaaaaaaaaa

SEQ ID NO: 1533 - RNA, 828 nt, Artificial Sequence; identical to SEQ ID NO: 1532
  mRNA product Design i-3 (hSL-A100) comprising derived and/or modified sequence from RVA/DS-1/P[4]__ABV53252.1__P2_VP8*(41-223) (opt1)

SEQ ID NO: 1534 - RNA, 828 nt, Artificial Sequence
  mRNA product Design i-3 (hSL-A100) comprising derived and/or modified sequence from RVA/F01322/P[6]__AFA51886.1__P2_VP8*(41-223) (opt1)
aggagaaagcuuaccaugcaguacaucaaggccaacagcaaguucaucggcaucaccgagcugggguccggcagcggggcccagaccaacuacgcgcccgugacguggucccacggcgaggucaacgacagcaccaccaucgagccggugcucgacgggcccuaccagcccaccaacuucaagcccccgaacgacuacuggauccugcugaaccccacgaaccagcaggucgugcucgagggcaccaacaagaccgacaucuggguggcccugcugcucguggagcccaacgucaccaaccagucccgccaguacacgcuguucggcgagaccaagcagaucaccguggagaacaacaccaacaaguggaaguucuucgagauguuccggagcuccgugagcgccgaguuccagcacaagcgcacgcugaccuccgacaccaagcucgccggguucaugaaguucuacaacagcgucuggaccuuccacggcgagacgcccaacgccaccaccgacuacuccagcaccuccaaccuguucgagguggagacggugauccacgucgaguucuacaucaucccgcggagccaggaguccaagugcagcgaguacaucaacaccgggcugugaggacuaguuauaagacugacuagcccgaugggccucccaacgggcccuccuccccuccuugcaccgagauuaaucaaaggcucuuuucagagccaccaaaaaaaaaaaaaaaaaaaaaaaaaaaaaaaaaaaaaaaaaaaaaaaaaaaaaaaaaaaaaaaaaaaaaaaaaaaaaaaaaaaaaaaaaaaaaaaaaaaaa

SEQ ID NO: 1535 - RNA, 828 nt, Artificial Sequence
  mRNA product Design i-3 (hSL-A100) comprising derived and/or modified sequence from RVA/1076/P[6]__AAA47337.1__P2_VP8*(41-223) (opt1)
aggagaaagcuuaccaugcaguacaucaaggccaacagcaaguucaucggcaucaccgagcugggguccggcagcggggcccagaccaacuacgcgcccgugacguggucccacggcgaggucaacgacagcaccaccaucgagccggugcucgacgggcccuaccagcccaccuccuucaagcccccgagcgacuacuggauccugcugaaccccacgaaccagcaggucgugcucgagggcaccaacaagaccgacaucuggguggcccugcugcucguggagcccaacgucaccaaccagucccgccaguacacgcuguucggcgagaccaagcagaucaccguggagaacaacaccaacaaguggaaguucuucgagauguuccggagcuccgugagcgccgaguuccagcacaagcgcacgcugaccuccgacaccaagcucgccggguuccugaaguucuacaacagcgucuggaccuucuacggcgagacgccccacgccaccaccgacuacuccagcaccuccaaccugagcgagguggagacggcgauccacguggaguucuacaucaucccgcggucccaggagagcaagugcaacgaguacaucaacaccgggcucugaggacuaguuauaagacugacuagcccgaugggccucccaacgggcccuccuccccuccuugcaccgagauuaaucaaaggcucuuuucagagccaccaaaaaaaaaaaaaaaaaaaaaaaaaaaaaaaaaaaaaaaaaaaaaaaaaaaaaaaaaaaaaaaaaaaaaaaaaaaaaaaaaaaaaaaaaaaaaaaaaaaaa

SEQ ID NO: 1536 - RNA, 828 nt, Artificial Sequence
  mRNA product Design i-3 (hSL-A100) comprising derived and/or modified sequence from RVA/BE1128/P[8]__AEX30671.1__P2_VP8*(41-223) (opt1)
aggagaaagcuuaccaugcaguacaucaaggccaacagcaaguucaucggcaucaccgagcugggguccggcagcggggcccagacccgcuacgcgcccgugaacuggggccacggggagaucaacgacuccacgaccgucgagccgauccucgacggccccuaccagcccaccaccuucacgcccccgaccgacuacuggauccugaucaccagcaacaccaacggcgugguguacgaguccacgaacaacagcgacuucuggaccgccgucaucgccguggagccccacgugaaccccgucgaccggcaguacaacguguucggggagaacaagcaguucaacgugcgcaacgacuccgacaaguggaaguuccuggagauguuccggggcagcucccagaacgacuucuacaaccgccggacccucaccagcgacacgcgccuggucgggauccugaaguacggcgggcggguguggaccuuccacggcgagacgccccgcgccaccaccgacuccagcaacaccgccaaccucgacggcaucuccaucaccauccacagcgaguucuacaucaucccgcggucccaggagagcaagugcaacgaguacaucaacaacgggcugugaggacuaguuauaagacugacuagcccgaugggccucccaacgggcccuccuccccuccuugcaccgagauuaaucaaaggcucuuuucagagccaccaaaaaaaaaaaaaaaaaaaaaaaaaaaaaaaaaaaaaaaaaaaaaaaaaaaaaaaaaaaaaaaaaaaaaaaaaaaaaaaaaaaaaaaaaaaaaaaaaaaaa

SEQ ID NO: 1537 - RNA, 828 nt, Artificial Sequence
  mRNA product Design i-3 (hSL-A100) comprising derived and/or modified sequence from RVA/Wa-VirWa/P[8]__ACR22783.1__P2_VP8*(41-223) (opt1)
aggagaaagcuuaccaugcaguacaucaaggccaacagcaaguucaucggcaucaccgagcugggguccggcagcggggcccagacccgcuacgcgcccgugaacuggggccacggggagaucaacgacuccacgaccgucgagccgauccucgacggccccuaccagcccaccaccuucacgcccccgaacgacuacuggauccugaucaacagcaacaccaacggcgugguguacgaguccaccaacaacagcgacuucuggaccgccgucguggccaucgagccccacgugaaccccgucgaccggcaguacacgaucuucggggaguccaagcaguucaacgugcgcaacgacagcaacaaguggaaguuccuggagauguuccgguccagcucccagaacgaguucuacaaccgccggacccucaccagcgacacccgccuggugggcauccugaaguacgggggccgggucuggacguuccacggggagacgccccgcgccaccaccgacuccagcuccaccgccaaccucaacaacaucagcaucaccauccacuccgaguucuacaucaucccgcggagccaggaguccaagugcaacgaguacaucaacaacggccugugaggacuaguuauaagacugacuagcccgaugggccucccaacgggcccuccuccccuccuugcaccgagauuaaucaaaggcucuuuucagagccaccaaaaaaaaaaaaaaaaaaaaaaaaaaaaaaaaaaaaaaaaaaaaaaaaaaaaaaaaaaaaaaaaaaaaaaaaaaaaaaaaaaaaaaaaaaaaaaaaaaaaa

SEQ ID NO: 1538 - RNA, 828 nt, Artificial Sequence
  mRNA product Design i-3 (hSL-A100) comprising derived and/or modified sequence from RVA/Wa/P[8]__AAA47290.1__P2_VP8*(41-223) (opt1)
aggagaaagcuuaccaugcaguacaucaaggccaacagcaaguucaucggcaucaccgagcugggguccggcagcggggcccagacccgcuacgcgcccgugaacuggggccacggggagaucaacgacuccacgaccgucgagccgauccucgacggccccuaccagcccaccaccuucacgcccccgaacgacuacuggauccugaucaacagcaacaccaacggcgugguguacgaguccaccaacaacagcgacuucuggaccgccgucguggccaucgagccccacgugaaccccgucgaccggcaguacacgaucuucggggaguccaagcaguucaacgugagcaacgacuccaacaaguggaaguuccuggagauguuccgcagcuccagccagaacgaguucuacaaccggcgcacccucaccuccgacacccgguucgugggcauccugaaguacgggggccgcgucuggacguuccacggggagacgccccgggccaccaccgacagcuccagcaccgccaaccugaacaacaucuccaucaccauccacagcgaguucuacaucaucccgcgcucccaggagagcaagugcaacgaguacaucaacaacggccucugaggacuaguuauaagacugacuagcccgaugggccucccaacgggcccuccuccccuccuugcaccgagauuaaucaaaggcucuuuucagagccaccaaaaaaaaaaaaaaaaaaaaaaaaaaaaaaaaaaaaaaaaaaaaaaaaaaaaaaaaaaaaaaaaaaaaaaaaaaaaaaaaaaaaaaaaaaaaaaaaaaaaa

SEQ ID NO: 1539 - RNA, 828 nt, Artificial Sequence
  mRNA product Design i-3 (hSL-A100) comprising derived and/or modified sequence from RVA/Wa/P[8]__AAA66953.1__P2_VP8*(41-223) (opt1)
aggagaaagcuuaccaugcaguacaucaaggccaacagcaaguucaucggcaucaccgagcugggguccggcagcggggcccagacccgcuacgcgcccgugaacuggggccacggggagaucaacgacuccacgaccgucgagccgaugcucgacggccccuaccagcccaccaccuucacgcccccgaacgacuacuggauccugaucaacagcaacaccaacggcgugguguacgaguccaccaacaacagcgacuucuggaccgccgucguggccaucgagccccacgugaaccccgucgaccggcaguacacgaucuucggggaguccaagcaguucaacgugagcaacgacuccaacaaguggaaguuccuggagauguuccgcagcuccagccagaacgaguucuacaaccggcgcacccucaccuccgacacccgguucgugggcauccugaaguacgggggccgcgucuggacguuccacggggagacgccccgggccaccaccgacagcuccagcaccgccaaccugaacaacaucuccaucaccauccacagcgaguucuacaucaucccgcgcucccaggagagcaagugcaacgaguacaucaacaacggccucugaggacuaguuauaagacugacuagcccgaugggccucccaacgggcccuccuccccuccuugcaccgagauuaaucaaaggcucuuuucagagccaccaaaaaaaaaaaaaaaaaaaaaaaaaaaaaaaaaaaaaaaaaaaaaaaaaaaaaaaaaaaaaaaaaaaaaaaaaaaaaaaaaaaaaaaaaaaaaaaaaaaaa

SEQ ID NO: 1540 - RNA, 1254 nt, Artificial Sequence
  mRNA product Design i-3 (hSL-A100) comprising derived and/or modified sequence from RVA/BE1058/P[4]__AEX30665.1__P2_VP8*(65-223)_Ferritin (opt1)
aggagaaagcuuaccaugcaguacaucaaggccaacagcaaguucaucggcaucaccgagcugggguccggcagcgggcucgacggccccuaccagccgaccacguucaagccgcccaacgacuacuggcugcugaucuccagcaacaccgacgggguggucuacgaguccaccaacaacagcgacuucuggaccgccgugaucgcgguggagccccacgucaaccagacgaaccgccaguacguccucuucggcgagaacaagcaguucaacaucgagaacuccagcgacaaguggaaguucuucgagauguucaagggcaacucccagagcgacuucuccaaccggcgcacccugaccagcuccaaccggcugguggggaugcucaaguacggcgggcgcguguggaccuuccacggcgagacgccccgggccaccaccgacagcuccagcaccgccgaccugaacaacaucuccaucaucauccacagcgaguucuacaucaucccccgcucccaggagagcaagugcaacgaguacaucaacaacgggcugagcggcggcgacaucaucaagcuccugaacgagcaggucaacaaggagaugcaguccagcaaccuguacauguccaugagcuccuggugcuacacgcacagccucgacggggccggccuguuccuguucgaccacgccgcggaggaguacgagcacgccaagaagcucaucaucuuccugaacgagaacaacgugcccgugcagcugaccuccaucagcgcccccgagcacaaguucgaggggcucacccagaucuuccagaaggccuacgagcacgagcagcacaucuccgagagcaucaacaacaucguggaccacgcgaucaaguccaaggaccacgccaccuucaacuuccugcagugguacguggccgagcagcacgaggaggagguccuguucaaggacauccucgacaagaucgagcugaucggcaacgagaaccacggccuguaccucgccgaccaguacgugaaggggaucgccaagagccggaaguccugaggacuaguuauaagacugacuagcccgaugggccucccaacgggcccuccuccccuccuugcaccgagauuaaucaaaggcucuuuucagagccaccaaaaaaaaaaaaaaaaaaaaaaaaaaaaaaaaaaaaaaaaaaaaaaaaaaaaaaaaaaaaaaaaaaaaaaaaaaaaaaaaaaaaaaaaaaaaaaaaaaaaa

SEQ ID NO: 1541 - RNA, 1254 nt, Artificial Sequence
  mRNA product Design i-3 (hSL-A100) comprising derived and/or modified sequence from RVA/DS-1/P[4]__CAD62680.1__P2_VP8*(65-223)_Ferritin (opt1)
aggagaaagcuuaccaugcaguacaucaaggccaacagcaaguucaucggcaucaccgagcugggguccggcagcgggcucgacggccccuaccagccgaccacguucaagccgcccaacgacuacuggcugcugaucuccagcaacaccaacgggguggucuacgaguccaccaacaacaacgacuucuggaccgccgugagcuccguggagccccacgucagccagacgaaccgccaguacauccucuucggcgagaacaagcaguucaacguggagaacaacuccgacaaguggaaguucuucgagaccuucaccggcagcucccaggggaacuucagcaaccggcgcacccugacguccagcaaccggcuggugggcaugcucaaguacgggggccgcgucuggaccuuccacggggagacgccccgggcgaccaccgacuccagcaacaccgccgaccugaacaacaucuccaucaucauccacagcgaguucuacaucaucccccgcucccaggagagcaagugcaacgaguacaucaacaacggccugagcggcggggacaucaucaagcuccugaacgagcaggucaacaaggagaugcaguccagcaaccuguacauguccaugagcuccuggugcuacacccacagccucgacggcgccgggcuguuccuguucgaccacgccgccgaggaguacgagcacgcgaagaagcucaucaucuuccugaacgagaacaacgugcccgugcagcugaccuccaucagcgcccccgagcacaaguucgagggccucacgcagaucuuccagaaggccuacgagcacgagcagcacaucuccgagagcaucaacaacaucguggaccacgccaucaaguccaaggaccacgcgaccuucaacuuccugcagugguacguggccgagcagcacgaggaggagguccuguucaaggacauccucgacaagaucgagcugaucggcaacgagaaccacgggcuguaccucgccgaccaguacgugaagggcaucgccaagagccggaaguccugaggacuaguuauaagacugacuagcccgaugggccucccaacgggcccuccuccccuccuugcaccgagauuaaucaaaggcucuuuucagagccaccaaaaaaaaaaaaaaaaaaaaaaaaaaaaaaaaaaaaaaaaaaaaaaaaaaaaaaaaaaaaaaaaaaaaaaaaaaaaaaaaaaaaaaaaaaaaaaaaaaaaa

SEQ ID NO: 1542 - RNA, 1254 nt, Artificial Sequence; identical to SEQ ID NO: 1541
  mRNA product Design i-3 (hSL-A100) comprising derived and/or modified sequence from RVA/DS-1/P[4]__ABV53252.1__P2_VP8*(65-223)_Ferritin (opt1)

SEQ ID NO: 1543 - RNA, 1254 nt, Artificial Sequence
  mRNA product Design i-3 (hSL-A100) comprising derived and/or modified sequence from RVA/F01322/P[6]__AFA51886.1__P2_VP8*(65-223)_Ferritin (opt1)
aggagaaagcuuaccaugcaguacaucaaggccaacagcaaguucaucggcaucaccgagcugggguccggcagcgggcucgacggccccuaccagccgaccaacuucaagccgcccaacgacuacuggauccugcugaaccccacgaaccagcaggucgugcucgaggggaccaacaagaccgacaucuggguggcccugcugcucguggagcccaacgucaccaaccagucccgccaguacacgcuguucggcgagaccaagcagaucaccguggagaacaacaccaacaaguggaaguucuucgagauguuccggagcuccgugagcgcggaguuccagcacaagcgcacgcugaccuccgacaccaagcucgccggcuucaugaaguucuacaacagcgucuggaccuuccacggggagacgcccaacgccaccaccgacuacuccagcaccuccaaccuguucgagguggagacggugauccacgucgaguucuacaucaucccccggagccaggaguccaagugcagcgaguacaucaacaccggccuguccgggggcgacaucaucaagcuccugaacgagcaggucaacaaggagaugcagagcuccaaccuguacaugagcauguccagcuggugcuacacccacagccucgacggggccggccuguuccuguucgaccacgccgcggaggaguacgagcacgccaagaagcucaucaucuuccugaacgagaacaacgugcccgugcagcugaccuccaucagcgccccggagcacaaguucgagggccucacgcagaucuuccagaaggccuacgagcacgagcagcacaucuccgagagcaucaacaacaucguggaccacgcgaucaaguccaaggaccacgccaccuucaacuuccugcagugguacguggccgagcagcacgaggaggagguccuguucaaggacauccucgacaagaucgagcugaucgggaacgagaaccacggccuguaccucgccgaccaguacgugaaggggaucgccaagagccgcaaguccugaggacuaguuauaagacugacuagcccgaugggccucccaacgggcccuccuccccuccuugcaccgagauuaaucaaaggcucuuuucagagccaccaaaaaaaaaaaaaaaaaaaaaaaaaaaaaaaaaaaaaaaaaaaaaaaaaaaaaaaaaaaaaaaaaaaaaaaaaaaaaaaaaaaaaaaaaaaaaaaaaaaaa

SEQ ID NO: 1544 - RNA, 1254 nt, Artificial Sequence
  mRNA product Design i-3 (hSL-A100) comprising derived and/or modified sequence from RVA/1076/P[6]__AAA47337.1__P2_VP8*(65-223)_Ferritin (opt1)
aggagaaagcuuaccaugcaguacaucaaggcgaacagcaaguucaucggcaucaccgagcugggguccggcagcgggcucgacggccccuaccagccgaccuccuucaagccgcccagcgacuacuggauccugcugaaccccacgaaccagcaggucgugcucgaggggaccaacaagaccgacaucuggguggcccugcugcucguggagcccaacgucaccaaccagucccgccaguacacgcuguucggcgagaccaagcagaucaccguggagaacaacaccaacaaguggaaguucuucgagauguuccggagcuccgugagcgcggaguuccagcacaagcgcacgcugaccuccgacaccaagcucgccggcuuccugaaguucuacaacagcgucuggaccuucuacggggagacgccccacgccaccaccgacuacuccagcaccuccaaccugagcgagguggagacggccauccacguggaguucuacaucaucccccggucccaggagagcaagugcaacgaguacaucaacaccggccucuccgggggcgacaucaucaagcugcugaacgagcaggucaacaaggagaugcagagcuccaaccucuacaugagcaugagcuccuggugcuacacccacagccuggacggggccggccuguuccucuucgaccacgcggccgaggaguacgagcacgccaagaagcugaucaucuuccugaacgagaacaacgugcccgugcagcucaccuccaucagcgccccggagcacaaguucgagggccugacgcagaucuuccagaaggcguacgagcacgagcagcacaucuccgagagcaucaacaacaucgucgaccacgccaucaaguccaaggaccacgccaccuucaacuuccugcagugguacguggccgagcagcacgaggaggagguccucuucaaggacauccuggacaagaucgagcugaucgggaacgagaaccacggccucuaccuggccgaccaguacgugaaggggaucgccaagagccgcaaguccugaggacuaguuauaagacugacuagcccgaugggccucccaacgggcccuccuccccuccuugcaccgagauuaaucaaaggcucuuuucagagccaccaaaaaaaaaaaaaaaaaaaaaaaaaaaaaaaaaaaaaaaaaaaaaaaaaaaaaaaaaaaaaaaaaaaaaaaaaaaaaaaaaaaaaaaaaaaaaaaaaaaaa

SEQ ID NO: 1545 - RNA, 1254 nt, Artificial Sequence
  mRNA product Design i-3 (hSL-A100) comprising derived and/or modified sequence from RVA/BE1128/P[8]__AEX30671.1__P2_VP8*(65-223)_Ferritin (opt1)
aggagaaagcuuaccaugcaguacaucaaggccaacagcaaguucaucggcaucaccgagcugggguccggcagcgggcucgacggccccuaccagccgaccacguucaccccgcccaccgacuacuggauccugaucaccuccaacacgaacgggguggucuacgagagcaccaacaacuccgacuucuggaccgccgugaucgcgguggagccccacgucaaccccguggaccggcaguacaacguguucggcgagaacaagcaguucaacguccggaacgacagcgacaaguggaaguuccuggagauguuccgcggcuccagccagaacgacuucuacaaccggcgcacccucacguccgacacccggcugguggggauccugaaguacggcgggcgcguguggaccuuccacggcgagacgccccgggccaccaccgacagcuccaacaccgccaaccucgacgggaucagcaucaccauccacuccgaguucuacaucaucccccgcagccaggaguccaagugcaacgaguacaucaacaacggccugagcggcggggacaucaucaagcugcucaacgagcaggucaacaaggagaugcaguccagcaaccuguacauguccaugagcagcuggugcuacacgcacucccuggacggcgccggccucuuccuguucgaccacgccgcggaggaguacgagcacgccaagaagcugaucaucuuccucaacgagaacaacgugcccgugcagcugaccagcaucuccgccccggagcacaaguucgaggggcugacccagaucuuccagaaggccuacgagcacgagcagcacaucagcgaguccaucaacaacaucgucgaccacgcgaucaagagcaaggaccacgccaccuucaacuuccuccagugguacguggccgagcagcacgaggaggaggugcuguucaaggacauccuggacaagaucgagcucaucggcaacgagaaccacgggcuguaccuggccgaccaguacgucaagggcaucgccaagucccgcaagagcugaggacuaguuauaagacugacuagcccgaugggccucccaacgggcccuccuccccuccuugcaccgagauuaaucaaaggcucuuuucagagccaccaaaaaaaaaaaaaaaaaaaaaaaaaaaaaaaaaaaaaaaaaaaaaaaaaaaaaaaaaaaaaaaaaaaaaaaaaaaaaaaaaaaaaaaaaaaaaaaaaaaaa

SEQ ID NO: 1546 - RNA, 1254 nt, Artificial Sequence
  mRNA product Design i-3 (hSL-A100) comprising derived and/or modified sequence from RVA/Wa-VirWa/P[8]__ACR22783.1__P2_VP8*(65-223)_Ferritin (opt1)
aggagaaagcuuaccaugcaguacaucaaggccaacagcaaguucaucggcaucaccgagcugggguccggcagcgggcucgacggccccuaccagccgaccacguucaccccgcccaacgacuacuggauccugaucaacuccaacaccaacgggguggucuacgagagcaccaacaacuccgacuucuggacggccgugguggcgaucgagccccacgucaaccccguggaccgccaguacaccaucuucggcgagagcaagcaguucaacgugcggaacgacuccaacaaguggaaguuccuggagauguuccgcagcuccagccagaacgaguucuacaaccggcgcacccucaccuccgacacgcggcuggucggcauccugaaguacgggggccgcguguggaccuuccacggggagacgccccgggccaccaccgacagcuccagcaccgccaaccucaacaacaucuccaucaccauccacagcgaguucuacaucaucccccgcucccaggagagcaagugcaacgaguacaucaacaacggccuguccgggggcgacaucaucaagcugcucaacgagcaggucaacaaggagaugcagagcagcaaccuguacauguccaugagcuccuggugcuacacccacagccuggacggcgccggccucuuccuguucgaccacgccgcggaggaguacgagcacgccaagaagcugaucaucuuccucaacgagaacaacgugcccgugcagcugacguccaucagcgccccggagcacaaguucgaggggcugacccagaucuuccagaaggccuacgagcacgagcagcacaucuccgagagcaucaacaacaucguggaccacgcgaucaaguccaaggaccacgccaccuucaacuuccuccagugguacgucgccgagcagcacgaggaggaggugcuguucaaggacauccuggacaagaucgagcucaucgggaacgagaaccacggccuguaccuggccgaccaguacgugaagggcaucgccaagagccggaaguccugaggacuaguuauaagacugacuagcccgaugggccucccaacgggcccuccuccccuccuugcaccgagauuaaucaaaggcucuuuucagagccaccaaaaaaaaaaaaaaaaaaaaaaaaaaaaaaaaaaaaaaaaaaaaaaaaaaaaaaaaaaaaaaaaaaaaaaaaaaaaaaaaaaaaaaaaaaaaaaaaaaaaa

SEQ ID NO: 1547 - RNA, 1254 nt, Artificial Sequence
  mRNA product Design i-3 (hSL-A100) comprising derived and/or modified sequence from RVA/Wa/P[8]__AAA47290.1__P2_VP8*(65-223)_Ferritin (opt1)
aggagaaagcuuaccaugcaguacaucaaggccaacagcaaguucaucggcaucaccgagcugggguccggcagcgggcucgacggccccuaccagccgaccacguucaccccgcccaacgacuacuggauccugaucaacuccaacaccaacggggugguguacgagagcaccaacaacuccgacuucuggacggccgugguggcgaucgagccccacgucaaccccguggaccgccaguacaccaucuucggcgagagcaagcaguucaacguguccaacgacagcaacaaguggaaguuccuggagauguuccgguccagcucccagaacgaguucuacaaccgccggacccucaccagcgacacgcgcuucgucggcauccugaaguacgggggccggguguggaccuuccacggggagacgccccgcgccaccaccgacuccagcuccaccgccaaccugaacaacaucagcaucaccauccacuccgaguucuacaucaucccccggagccaggaguccaagugcaacgaguacaucaacaacggccucagcgggggcgacaucaucaagcugcugaacgagcaggucaacaaggagaugcagagcuccaaccucuacaugagcauguccagcuggugcuacacccacucccuggacggcgccgggcuguuccucuucgaccacgccgcggaggaguacgagcacgccaagaagcugaucaucuuccugaacgagaacaacgugcccgugcagcucacgagcaucuccgccccggagcacaaguucgagggccugacccagaucuuccagaaggccuacgagcacgagcagcacaucagcgaguccaucaacaacaucguggaccacgcgaucaagagcaaggaccacgccaccuucaacuuccugcagugguacgucgccgagcagcacgaggaggagguccucuucaaggacauccuggacaagaucgagcugaucgggaacgagaaccacggccucuaccuggccgaccaguacgugaagggcaucgccaagucccgcaagagcugaggacuaguuauaagacugacuagcccgaugggccucccaacgggcccuccuccccuccuugcaccgagauuaaucaaaggcucuuuucagagccaccaaaaaaaaaaaaaaaaaaaaaaaaaaaaaaaaaaaaaaaaaaaaaaaaaaaaaaaaaaaaaaaaaaaaaaaaaaaaaaaaaaaaaaaaaaaaaaaaaaaaa

SEQ ID NO: 1548 - RNA, 1254 nt, Artificial Sequence; identical to SEQ ID NO: 1547
  mRNA product Design i-3 (hSL-A100) comprising derived and/or modified sequence from RVA/Wa/P[8]__AAA66953.1__P2_VP8*(65-223)_Ferritin (opt1)

SEQ ID NO: 1549 - RNA, 1326 nt, Artificial Sequence
  mRNA product Design i-3 (hSL-A100) comprising derived and/or modified sequence from RVA/BE1058/P[4]__AEX30665.1__P2_VP8*(41-223)_Ferritin (opt1)
aggagaaagcuuaccaugcaguacaucaaggccaacagcaaguucaucggcaucaccgagcugggguccggcagcggggcccagacccgcuacgcgcccgugaacuggggccacggggagaucaacgacuccacgaccgucgagccggugcucgacggccccuaccagcccaccaccuucaagcccccgaacgacuacuggcugcugaucagcuccaacacggacggcguggucuacgagagcaccaacaacuccgacuucuggaccgccgugaucgccguggagccccacgucaaccagaccaaccggcaguacguccucuucggggagaacaagcaguucaacaucgagaacagcuccgacaaguggaaguucuucgagauguucaagggcaacagccaguccgacuucagcaaccgccggacgcugaccuccagcaaccgccugguggggaugcucaaguacggcgggcggguguggaccuuccacggcgagacgccccgcgccaccaccgacuccagcuccaccgccgaccugaacaacaucagcaucaucauccacuccgaguucuacaucaucccccggagccaggagagcaagugcaacgaguacaucaacaacggccuguccgggggcgacaucaucaagcuccugaacgagcaggucaacaaggagaugcagagcuccaaccuguacaugagcauguccagcuggugcuacacccacucccucgacggggcgggccuguuccuguucgaccacgccgccgaggaguacgagcacgccaagaagcucaucaucuuccugaacgagaacaacgugccggugcagcugacgagcaucuccgcgcccgagcacaaguucgagggccucacccagaucuuccagaaggccuacgagcacgagcagcacaucagcgaguccaucaacaacaucguggaccacgccaucaagagcaaggaccacgccaccuucaacuuccugcagugguacguggccgagcagcacgaggaggagguccuguucaaggacauccucgacaagaucgagcugaucgggaacgagaaccacggccuguaccucgcggaccaguacgugaaggggaucgccaagucccgcaagagcugaggacuaguuauaagacugacuagcccgaugggccucccaacgggcccuccuccccuccuugcaccgagauuaaucaaaggcucuuuucagagccaccaaaaaaaaaaaaaaaaaaaaaaaaaaaaaaaaaaaaaaaaaaaaaaaaaaaaaaaaaaaaaaaaaaaaaaaaaaaaaaaaaaaaaaaaaaaaaaaaaaaaa

SEQ ID NO: 1550 - RNA, 1326 nt, Artificial Sequence
  mRNA product Design i-3 (hSL-A100) comprising derived and/or modified sequence from RVA/DS-1/P[4]__CAD62680.1__P2_VP8*(41-223)_Ferritin (opt1)
aggagaaagcuuaccaugcaguacaucaaggcgaacagcaaguucaucggcaucaccgagcugggguccggcagcggggcccagacccgcuacgcgcccgugaacuggggcuccugggagaucaacgacagcacgaccgucgagccggugcucgacgggcccuaccagcccaccaccuucaagcccccgaacgacuacuggcugcugaucuccagcaacacgaacggcguggucuacgaguccaccaacaacaacgacuucuggaccgccgugagcuccguggagccccacgucagccagaccaaccggcaguacauccucuucggcgagaacaagcaguucaacguggagaacaacuccgacaaguggaaguucuucgagacguucaccgggagcucccagggcaacuucagcaaccgccggacccugaccuccagcaaccgccugguggggaugcucaaguacggcgggcgggucuggacguuccacggcgagacgccccgcgccaccaccgacuccagcaacaccgccgaccugaacaacaucuccaucaucauccacagcgaguucuacaucaucccccggagccaggaguccaagugcaacgaguacaucaacaacggccugagcgggggcgacaucaucaagcuccugaacgagcaggucaacaaggagaugcaguccagcaaccuguacauguccaugagcuccuggugcuacacccacagccucgacggggccggccuguuccuguucgaccacgcggccgaggaguacgagcacgccaagaagcucaucaucuuccugaacgagaacaacgugccggugcagcugaccuccaucagcgcccccgagcacaaguucgagggccucacccagaucuuccagaaggcguacgagcacgagcagcacaucuccgagagcaucaacaacaucguggaccacgccaucaaguccaaggaccacgccacguucaacuuccugcagugguacguggccgagcagcacgaggaggagguccuguucaaggacauccucgacaagaucgagcugaucgggaacgagaaccacggccuguaccucgccgaccaguacgugaaggggaucgccaagagccgcaaguccugaggacuaguuauaagacugacuagcccgaugggccucccaacgggcccuccuccccuccuugcaccgagauuaaucaaaggcucuuuucagagccaccaaaaaaaaaaaaaaaaaaaaaaaaaaaaaaaaaaaaaaaaaaaaaaaaaaaaaaaaaaaaaaaaaaaaaaaaaaaaaaaaaaaaaaaaaaaaaaaaaaaaa

SEQ ID NO: 1551 - RNA, 1326 nt, Artificial Sequence; identical to SEQ ID NO: 1550
  mRNA product Design i-3 (hSL-A100) comprising derived and/or modified sequence from RVA/DS-1/P[4]__ABV53252.1__P2_VP8*(41-223)_Ferritin (opt1)

SEQ ID NO: 1552 - RNA, 1326 nt, Artificial Sequence
  mRNA product Design i-3 (hSL-A100) comprising derived and/or modified sequence from RVA/F01322/P[6]__AFA51886.1__P2_VP8*(41-223)_Ferritin (opt1)
aggagaaagcuuaccaugcaguacaucaaggccaacagcaaguucaucggcaucaccgagcugggguccggcagcggggcccagaccaacuacgcgcccgugacguggucccacggcgaggucaacgacagcaccaccaucgagccggugcucgacgggcccuaccagcccaccaacuucaagcccccgaacgacuacuggauccugcugaaccccacgaaccagcaggucgugcucgagggcaccaacaagaccgacaucuggguggcccugcugcucguggagcccaacgucaccaaccagucccgccaguacacgcuguucggcgagaccaagcagaucaccguggagaacaacaccaacaaguggaaguucuucgagauguuccggagcuccgugagcgccgaguuccagcacaagcgcacgcugaccuccgacaccaagcucgccggguucaugaaguucuacaacagcgucuggaccuuccacggcgagacgcccaacgccaccaccgacuacuccagcaccuccaaccuguucgagguggagacggugauccacgucgaguucuacaucaucccgcggagccaggaguccaagugcagcgaguacaucaacaccgggcuguccggcggggacaucaucaagcuccugaacgagcaggucaacaaggagaugcagagcuccaaccuguacaugagcaugagcuccuggugcuacacccacagccucgacggcgcgggccuguuccuguucgaccacgccgccgaggaguacgagcacgccaagaagcucaucaucuuccugaacgagaacaacgugcccgugcagcugaccuccaucagcgcgcccgagcacaaguucgaggggcucacgcagaucuuccagaaggccuacgagcacgagcagcacaucuccgagagcaucaacaacaucguggaccacgccaucaaguccaaggaccacgccaccuucaacuuccugcagugguacguggccgagcagcacgaggaggagguccuguucaaggacauccucgacaagaucgagcugaucggcaacgagaaccacgggcuguaccucgcggaccaguacgugaagggcaucgccaagagccgcaaguccugaggacuaguuauaagacugacuagcccgaugggccucccaacgggcccuccuccccuccuugcaccgagauuaaucaaaggcucuuuucagagccaccaaaaaaaaaaaaaaaaaaaaaaaaaaaaaaaaaaaaaaaaaaaaaaaaaaaaaaaaaaaaaaaaaaaaaaaaaaaaaaaaaaaaaaaaaaaaaaaaaaaaa

SEQ ID NO: 1553 - RNA, 1326 nt, Artificial Sequence
  mRNA product Design i-3 (hSL-A100) comprising derived and/or modified sequence from RVA/1076/P[6]__AAA47337.1__P2_VP8*(41-223)_Ferritin (opt1)
aggagaaagcuuaccaugcaguacaucaaggccaacagcaaguucaucggcaucaccgagcugggguccggcagcggggcccagaccaacuacgcgcccgugacguggucccacggcgaggucaacgacagcaccaccaucgagccggugcucgacgggcccuaccagcccaccuccuucaagcccccgagcgacuacuggauccugcugaaccccacgaaccagcaggucgugcucgagggcaccaacaagaccgacaucuggguggcccugcugcucguggagcccaacgucaccaaccagucccgccaguacacgcuguucggcgagaccaagcagaucaccguggagaacaacaccaacaaguggaaguucuucgagauguuccggagcuccgugagcgccgaguuccagcacaagcgcacgcugaccuccgacaccaagcucgccggguuccugaaguucuacaacagcgucuggaccuucuacggcgagacgccccacgccaccaccgacuacuccagcaccuccaaccugagcgagguggagacggcgauccacguggaguucuacaucaucccgcggucccaggagagcaagugcaacgaguacaucaacaccgggcucuccggcggggacaucaucaagcugcugaacgagcaggucaacaaggagaugcagagcagcaaccucuacauguccaugagcuccuggugcuacacccacagccuggacggcgccggccuguuccucuucgaccacgccgccgaggaguacgagcacgcgaagaagcugaucaucuuccugaacgagaacaacgugcccgugcagcucaccuccaucagcgcccccgagcacaaguucgaggggcugacgcagaucuuccagaaggccuacgagcacgagcagcacaucuccgagagcaucaacaacaucgucgaccacgccaucaaguccaaggaccacgccaccuucaacuuccugcagugguacguggcggagcagcacgaggaggagguccucuucaaggacauccuggacaagaucgagcugaucggcaacgagaaccacgggcucuaccuggccgaccaguacgugaagggcaucgccaagagccgcaaguccugaggacuaguuauaagacugacuagcccgaugggccucccaacgggcccuccuccccuccuugcaccgagauuaaucaaaggcucuuuucagagccaccaaaaaaaaaaaaaaaaaaaaaaaaaaaaaaaaaaaaaaaaaaaaaaaaaaaaaaaaaaaaaaaaaaaaaaaaaaaaaaaaaaaaaaaaaaaaaaaaaaaaa

SEQ ID NO: 1554 - RNA, 1326 nt, Artificial Sequence
  mRNA product Design i-3 (hSL-A100) comprising derived and/or modified sequence from RVA/BE1128/P[8]__AEX30671.1__P2_VP8*(41-223)_Ferritin (opt1)
aggagaaagcuuaccaugcaguacaucaaggccaacagcaaguucaucggcaucaccgagcugggguccggcagcggggcccagacccgcuacgcgcccgugaacuggggccacggggagaucaacgacuccacgaccgucgagccgauccucgacggccccuaccagcccaccaccuucacgcccccgaccgacuacuggauccugaucaccagcaacaccaacggcgugguguacgaguccacgaacaacagcgacuucuggaccgccgucaucgccguggagccccacgugaaccccgucgaccggcaguacaacguguucggggagaacaagcaguucaacgugcgcaacgacuccgacaaguggaaguuccuggagauguuccggggcagcucccagaacgacuucuacaaccgccggacccucaccagcgacacgcgccuggucgggauccugaaguacggcgggcggguguggaccuuccacggcgagacgccccgcgccaccaccgacuccagcaacaccgccaaccucgacggcaucuccaucaccauccacagcgaguucuacaucaucccgcggucccaggagagcaagugcaacgaguacaucaacaacgggcuguccggcggggacaucaucaagcugcucaacgagcaggucaacaaggagaugcagagcuccaaccuguacaugagcaugagcuccuggugcuacacccacagccuggacggcgcgggccucuuccuguucgaccacgccgccgaggaguacgagcacgccaagaagcugaucaucuuccucaacgagaacaacgugcccgugcagcugacguccaucagcgcgcccgagcacaaguucgaggggcugacccagaucuuccagaaggccuacgagcacgagcagcacaucuccgagagcaucaacaacaucguggaccacgccaucaaguccaaggaccacgccaccuucaacuuccuccagugguacgucgccgagcagcacgaggaggaggugcuguucaaggacauccuggacaagaucgagcucaucggcaacgagaaccacgggcuguaccuggcggaccaguacgugaagggcaucgccaagagccgcaaguccugaggacuaguuauaagacugacuagcccgaugggccucccaacgggcccuccuccccuccuugcaccgagauuaaucaaaggcucuuuucagagccaccaaaaaaaaaaaaaaaaaaaaaaaaaaaaaaaaaaaaaaaaaaaaaaaaaaaaaaaaaaaaaaaaaaaaaaaaaaaaaaaaaaaaaaaaaaaaaaaaaaaaa

SEQ ID NO: 1555 - RNA, 1326 nt, Artificial Sequence
  mRNA product Design i-3 (hSL-A100) comprising derived and/or modified sequence from RVA/Wa-VirWa/P[8]__ACR22783.1__P2_VP8*(41-223)_Ferritin (opt1)
aggagaaagcuuaccaugcaguacaucaaggccaacagcaaguucaucggcaucaccgagcugggguccggcagcggggcccagacccgcuacgcgcccgugaacuggggccacggggagaucaacgacuccacgaccgucgagccgauccucgacggccccuaccagcccaccaccuucacgcccccgaacgacuacuggauccugaucaacagcaacaccaacggcgugguguacgaguccaccaacaacagcgacuucuggaccgccgucguggccaucgagccccacgugaaccccgucgaccggcaguacacgaucuucggggaguccaagcaguucaacgugcgcaacgacagcaacaaguggaaguuccuggagauguuccgguccagcucccagaacgaguucuacaaccgccggacccucaccagcgacacccgccuggugggcauccugaaguacgggggccgggucuggacguuccacggggagacgccccgcgccaccaccgacuccagcuccaccgccaaccucaacaacaucagcaucaccauccacuccgaguucuacaucaucccgcggagccaggaguccaagugcaacgaguacaucaacaacggccugagcggcggggacaucaucaagcugcucaacgagcaggucaacaaggagaugcagagcuccaaccuguacaugagcauguccagcuggugcuacacccacucccuggacggcgcgggccucuuccuguucgaccacgccgccgaggaguacgagcacgccaagaagcugaucaucuuccucaacgagaacaacgugcccgugcagcugaccagcaucuccgcgcccgagcacaaguucgaggggcugacgcagaucuuccagaaggccuacgagcacgagcagcacaucagcgaguccaucaacaacaucguggaccacgccaucaagagcaaggaccacgccaccuucaacuuccuccagugguacguggccgagcagcacgaggaggagguccuguucaaggacauccuggacaagaucgagcucaucggcaacgagaaccacgggcuguaccuggcggaccaguacgugaagggcaucgccaagucccgcaagagcugaggacuaguuauaagacugacuagcccgaugggccucccaacgggcccuccuccccuccuugcaccgagauuaaucaaaggcucuuuucagagccaccaaaaaaaaaaaaaaaaaaaaaaaaaaaaaaaaaaaaaaaaaaaaaaaaaaaaaaaaaaaaaaaaaaaaaaaaaaaaaaaaaaaaaaaaaaaaaaaaaaaaa

SEQ ID NO: 1556 - RNA, 1326 nt, Artificial Sequence
  mRNA product Design i-3 (hSL-A100) comprising derived and/or modified sequence from RVA/Wa/P[8]__AAA47290.1__P2_VP8*(41-223)_Ferritin (opt1)
aggagaaagcuuaccaugcaguacaucaaggccaacagcaaguucaucggcaucaccgagcugggguccggcagcggggcccagacccgcuacgcgcccgugaacuggggccacggggagaucaacgacuccacgaccgucgagccgauccucgacggccccuaccagcccaccaccuucacgcccccgaacgacuacuggauccugaucaacagcaacaccaacggcgugguguacgaguccaccaacaacagcgacuucuggaccgccgucguggccaucgagccccacgugaaccccgucgaccggcaguacacgaucuucggggaguccaagcaguucaacgugagcaacgacuccaacaaguggaaguuccuggagauguuccgcagcuccagccagaacgaguucuacaaccggcgcacccucaccuccgacacccgguucgugggcauccugaaguacgggggccgcgucuggacguuccacggggagacgccccgggccaccaccgacagcuccagcaccgccaaccugaacaacaucuccaucaccauccacagcgaguucuacaucaucccgcgcucccaggagagcaagugcaacgaguacaucaacaacggccucagcggcggggacaucaucaagcugcugaacgagcaggucaacaaggagaugcaguccagcaaccucuacauguccaugagcuccuggugcuacacccacagccuggacggcgcggggcuguuccucuucgaccacgccgccgaggaguacgagcacgccaagaagcugaucaucuuccugaacgagaacaacgugcccgugcagcucaccuccaucagcgcgcccgagcacaaguucgagggccugacgcagaucuuccagaaggccuacgagcacgagcagcacaucuccgagagcaucaacaacaucguggaccacgccaucaaguccaaggaccacgccaccuucaacuuccugcagugguacguggccgagcagcacgaggaggagguccucuucaaggacauccuggacaagaucgagcugaucggcaacgagaaccacgggcucuaccuggcggaccaguacgugaagggcaucgccaagagccggaaguccugaggacuaguuauaagacugacuagcccgaugggccucccaacgggcccuccuccccuccuugcaccgagauuaaucaaaggcucuuuucagagccaccaaaaaaaaaaaaaaaaaaaaaaaaaaaaaaaaaaaaaaaaaaaaaaaaaaaaaaaaaaaaaaaaaaaaaaaaaaaaaaaaaaaaaaaaaaaaaaaaaaaaa

SEQ ID NO: 1557 - RNA, 1326 nt, Artificial Sequence
  mRNA product Design i-3 (hSL-A100) comprising derived and/or modified sequence from RVA/Wa/P[8]__AAA66953.1__P2_VP8*(41-223)_Ferritin (opt1)
aggagaaagcuuaccaugcaguacaucaaggccaacagcaaguucaucggcaucaccgagcugggguccggcagcggggcccagacccgcuacgcgcccgugaacuggggccacggggagaucaacgacuccacgaccgucgagccgaugcucgacggccccuaccagcccaccaccuucacgcccccgaacgacuacuggauccugaucaacagcaacaccaacggcgugguguacgaguccaccaacaacagcgacuucuggaccgccgucguggccaucgagccccacgugaaccccgucgaccggcaguacacgaucuucggggaguccaagcaguucaacgugagcaacgacuccaacaaguggaaguuccuggagauguuccgcagcuccagccagaacgaguucuacaaccggcgcacccucaccuccgacacccgguucgugggcauccugaaguacgggggccgcgucuggacguuccacggggagacgccccgggccaccaccgacagcuccagcaccgccaaccugaacaacaucuccaucaccauccacagcgaguucuacaucaucccgcgcucccaggagagcaagugcaacgaguacaucaacaacggccucagcggcggggacaucaucaagcugcugaacgagcaggucaacaaggagaugcaguccagcaaccucuacauguccaugagcuccuggugcuacacccacagccuggacggcgcggggcuguuccucuucgaccacgccgccgaggaguacgagcacgccaagaagcugaucaucuuccugaacgagaacaacgugcccgugcagcucaccuccaucagcgcgcccgagcacaaguucgagggccugacgcagaucuuccagaaggccuacgagcacgagcagcacaucuccgagagcaucaacaacaucguggaccacgccaucaaguccaaggaccacgccaccuucaacuuccugcagugguacguggccgagcagcacgaggaggagguccucuucaaggacauccuggacaagaucgagcugaucggcaacgagaaccacgggcucuaccuggcggaccaguacgugaagggcaucgccaagagccggaaguccugaggacuaguuauaagacugacuagcccgaugggccucccaacgggcccuccuccccuccuugcaccgagauuaaucaaaggcucuuuucagagccaccaaaaaaaaaaaaaaaaaaaaaaaaaaaaaaaaaaaaaaaaaaaaaaaaaaaaaaaaaaaaaaaaaaaaaaaaaaaaaaaaaaaaaaaaaaaaaaaaaaaaa

SEQ ID NO: 1558 - RNA, 1260 nt, Artificial Sequence
  mRNA product Design i-3 (hSL-A100) comprising derived and/or modified sequence from RVA/BE1058/P[4]__AEX30665.1__LumSynt_P2_VP8*(65-223) (opt1)
aggagaaagcuuaccaugcagaucuacgagggcaagcugaccgccgaggggcuccgcuucggcaucguggccagccgguucaaccacgcgcuggucgaccgccugguggagggggccaucgacgccaucgugcggcacggcgggcgcgaggaggacaucacccucguccgggugcccggcuccugggagaucccgguggccgccggcgagcuggcgcgcaaggaggacaucgacgccgucaucgccaucggggugcugauccggggcgccacgccccacuucgacuacaucgcgagcgagguguccaaggggcucgccgaccugagccuggagcuccgcaagcccaucaccuucggcgucaucaccgccgacacccuggagcaggccaucgagcgggccgggacgaagcacggcaacaagggcugggaggcggcccuguccgccaucgagauggccaaccucuucaagagccugcgcgggggcuccgggggcagcggcggguccggcgggagcggcgggggccaguacaucaaggccaacuccaaguucaucggcaucaccgagcuggggagcggcuccgggcucgacggccccuaccagccgaccaccuucaagccgcccaacgacuacuggcugcugaucagcuccaacacggacggggugguguacgagagcaccaacaacuccgacuucuggaccgcggucaucgccguggagccccacgugaaccagaccaaccggcaguacguccucuucggcgagaacaagcaguucaacaucgagaacagcuccgacaaguggaaguucuucgagauguucaagggcaacagccagagcgacuucuccaaccgccggacgcugaccagcuccaaccgccugguggggaugcucaaguacggcgggcggguguggaccuuccacggcgagacgccccgcgccaccaccgacagcuccagcaccgccgaccugaacaacaucuccaucaucauccacagcgaguucuacaucaucccccggucccaggagagcaagugcaacgaguacaucaacaacgggcugugaggacuaguuauaagacugacuagcccgaugggccucccaacgggcccuccuccccuccuugcaccgagauuaaucaaaggcucuuuucagagccaccaaaaaaaaaaaaaaaaaaaaaaaaaaaaaaaaaaaaaaaaaaaaaaaaaaaaaaaaaaaaaaaaaaaaaaaaaaaaaaaaaaaaaaaaaaaaaaaaaaaaa

SEQ ID NO: 1559 - RNA, 1260 nt, Artificial Sequence
  mRNA product Design i-3 (hSL-A100) comprising derived and/or modified sequence from RVA/DS-1/P[4]__CAD62680.1__LumSynt_P2_VP8*(65-223) (opt1)
aggagaaagcuuaccaugcagaucuacgagggcaagcugaccgccgaggggcuccgcuucggcaucguggccagccgguucaaccacgcgcuggucgaccgccugguggagggggccaucgacgccaucgugcggcacggcgggcgcgaggaggacaucacccucguccgggugcccggcuccugggagaucccgguggccgccggcgagcuggcgcgcaaggaggacaucgacgccgucaucgccaucggggugcugauccggggcgccacgccccacuucgacuacaucgcgagcgagguguccaaggggcucgccgaccugagccuggagcuccgcaagcccaucaccuucggcgucaucaccgccgacacccuggagcaggccaucgagcgggccgggacgaagcacggcaacaagggcugggaggcggcccuguccgccaucgagauggccaaccucuucaagagccugcgcgggggcuccgggggcagcggcggguccggcgggagcggcgggggccaguacaucaaggccaacuccaaguucaucggcaucaccgagcuggggagcggcuccgggcucgacggccccuaccagccgaccaccuucaagccgcccaacgacuacuggcugcugaucagcuccaacacgaacggggugguguacgagagcaccaacaacaacgacuucuggaccgcggucuccagcguggagccccacgugucccagaccaaccggcaguacauccucuucggcgagaacaagcaguucaacgucgagaacaacagcgacaaguggaaguucuucgagacguucaccggcagcucccaggggaacuucagcaaccgccggacccugaccuccagcaaccgccuggugggcaugcucaaguacgggggccggguguggacguuccacggggagacgccccgcgccaccaccgacuccagcaacaccgccgaccugaacaacaucuccaucaucauccacagcgaguucuacaucaucccccggucccaggagagcaagugcaacgaguacaucaacaacggccugugaggacuaguuauaagacugacuagcccgaugggccucccaacgggcccuccuccccuccuugcaccgagauuaaucaaaggcucuuuucagagccaccaaaaaaaaaaaaaaaaaaaaaaaaaaaaaaaaaaaaaaaaaaaaaaaaaaaaaaaaaaaaaaaaaaaaaaaaaaaaaaaaaaaaaaaaaaaaaaaaaaaaa

SEQ ID NO: 1560 - RNA, 1260 nt, Artificial Sequence; identical to SEQ ID NO: 1559
  mRNA product Design i-3 (hSL-A100) comprising derived and/or modified sequence from RVA/DS-1/P[4]__ABV53252.1__LumSynt_P2_VP8*(65-223) (opt1)

SEQ ID NO: 1561 - RNA, 1260 nt, Artificial Sequence
  mRNA product Design i-3 (hSL-A100) comprising derived and/or modified sequence from RVA/F01322/P[6]__AFA51886.1__LumSynt_P2_VP8*(65-223) (opt1)
aggagaaagcuuaccaugcagaucuacgagggcaagcugaccgccgaggggcuccgcuucggcaucguggccagccgguucaaccacgcgcuggucgaccgccugguggagggggccaucgacgccaucgugcggcacggcgggcgcgaggaggacaucacccucguccgggugcccggcuccugggagaucccgguggccgccggcgagcuggcgcgcaaggaggacaucgacgccgucaucgccaucggggugcugauccggggcgccacgccccacuucgacuacaucgcgagcgagguguccaaggggcucgccgaccugagccuggagcuccgcaagcccaucaccuucggcgucaucaccgccgacacccuggagcaggccaucgagcgggccgggacgaagcacggcaacaagggcugggaggcggcccuguccgccaucgagauggccaaccucuucaagagccugcgcgggggcuccgggggcagcggcggguccggcgggagcggcgggggccaguacaucaaggccaacuccaaguucaucggcaucaccgagcuggggagcggcuccgggcucgacggccccuaccagccgaccaacuucaagccgcccaacgacuacuggauccugcugaaccccaccaaccagcaggucgugcucgaggggacgaacaagaccgacaucuggguggcgcugcugcucguggagcccaacgugaccaaccagagccggcaguacacccuguucggcgagacgaagcagaucaccgucgagaacaacaccaacaaguggaaguucuucgagauguuccgcuccagcguguccgccgaguuccagcacaagcggacccugacgagcgacaccaagcucgccggcuucaugaaguucuacaacuccguguggaccuuccacggggagacccccaacgccacgaccgacuacagcagcaccuccaaccuguucgaggucgagaccgugauccacguggaguucuacaucaucccccgcagccaggaguccaagugcagcgaguacaucaacacgggccugugaggacuaguuauaagacugacuagcccgaugggccucccaacgggcccuccuccccuccuugcaccgagauuaaucaaaggcucuuuucagagccaccaaaaaaaaaaaaaaaaaaaaaaaaaaaaaaaaaaaaaaaaaaaaaaaaaaaaaaaaaaaaaaaaaaaaaaaaaaaaaaaaaaaaaaaaaaaaaaaaaaaaa

SEQ ID NO: 1562 - RNA, 1260 nt, Artificial Sequence
  mRNA product Design i-3 (hSL-A100) comprising derived and/or modified sequence from RVA/1076/P[6]__AAA47337.1__LumSynt_P2_VP8*(65-223) (opt1)
aggagaaagcuuaccaugcagaucuacgagggcaagcugaccgccgaggggcuccgcuucggcaucguggccagccgguucaaccacgcgcuggucgaccgccugguggagggggccaucgacgccaucgugcggcacggcgggcgcgaggaggacaucacccucguccgggugcccggcuccugggagaucccgguggccgccggcgagcuggcgcgcaaggaggacaucgacgccgucaucgccaucggggugcugauccggggcgccacgccccacuucgacuacaucgcgagcgagguguccaaggggcucgccgaccugagccuggagcuccgcaagcccaucaccuucggcgucaucaccgccgacacccuggagcaggccaucgagcgggccgggacgaagcacggcaacaagggcugggaggcggcccuguccgccaucgagauggccaaccucuucaagagccugcgcgggggcuccgggggcagcggcggguccggcgggagcggcgggggccaguacaucaaggccaacuccaaguucaucggcaucaccgagcuggggagcggcuccgggcucgacggccccuaccagccgaccagcuucaagccgcccuccgacuacuggauccugcugaaccccaccaaccagcaggucgugcucgaggggacgaacaagaccgacaucuggguggcgcugcugcucguggagcccaacgugaccaaccagagccggcaguacacccuguucggcgagacgaagcagaucaccgucgagaacaacaccaacaaguggaaguucuucgagauguuccgcuccagcguguccgccgaguuccagcacaagcggacccugacgagcgacaccaagcucgccggcuuccugaaguucuacaacagcguguggaccuucuacggggagacgccccacgccaccaccgacuacuccagcaccuccaaccugagcgaggucgagaccgccauccacguggaguucuacaucaucccccgcucccaggagagcaagugcaacgaguacaucaacacgggccucugaggacuaguuauaagacugacuagcccgaugggccucccaacgggcccuccuccccuccuugcaccgagauuaaucaaaggcucuuuucagagccaccaaaaaaaaaaaaaaaaaaaaaaaaaaaaaaaaaaaaaaaaaaaaaaaaaaaaaaaaaaaaaaaaaaaaaaaaaaaaaaaaaaaaaaaaaaaaaaaaaaaaa

SEQ ID NO: 1563 - RNA, 1260 nt, Artificial Sequence
  mRNA product Design i-3 (hSL-A100) comprising derived and/or modified sequence from RVA/BE1128/P[8]__AEX30671.1__LumSynt_P2_VP8*(65-223) (opt1)
aggagaaagcuuaccaugcagaucuacgagggcaagcugaccgccgaggggcuccgcuucggcaucguggccagccgguucaaccacgcgcuggucgaccgccugguggagggggccaucgacgccaucgugcggcacggcgggcgcgaggaggacaucacccucguccgggugcccggcuccugggagaucccgguggccgccggcgagcuggcgcgcaaggaggacaucgacgccgucaucgccaucggggugcugauccggggcgccacgccccacuucgacuacaucgcgagcgagguguccaaggggcucgccgaccugagccuggagcuccgcaagcccaucaccuucggcgucaucaccgccgacacccuggagcaggccaucgagcgggccgggacgaagcacggcaacaagggcugggaggcggcccuguccgccaucgagauggccaaccucuucaagagccugcgcgggggcuccgggggcagcggcggguccggcgggagcggcgggggccaguacaucaaggccaacuccaaguucaucggcaucaccgagcuggggagcggcuccgggcucgacggccccuaccagccgaccaccuucacgccgcccaccgacuacuggauccugaucaccagcaacaccaacggggugguguacgaguccacgaacaacagcgacuucuggaccgcggucaucgccguggagccccacgugaaccccgucgaccggcaguacaacguguucggcgagaacaagcaguucaacgugcgcaacgacuccgacaaguggaaguuccuggagauguuccggggcagcucccagaacgacuucuacaaccgccggacccucaccagcgacacgcgccuggucgggauccugaaguacggcgggcggguguggaccuuccacggcgagacgccccgcgccaccaccgacagcuccaacaccgccaaccucgacgggaucagcaucaccauccacuccgaguucuacaucaucccccggagccaggaguccaagugcaacgaguacaucaacaacggccugugaggacuaguuauaagacugacuagcccgaugggccucccaacgggcccuccuccccuccuugcaccgagauuaaucaaaggcucuuuucagagccaccaaaaaaaaaaaaaaaaaaaaaaaaaaaaaaaaaaaaaaaaaaaaaaaaaaaaaaaaaaaaaaaaaaaaaaaaaaaaaaaaaaaaaaaaaaaaaaaaaaaaa

SEQ ID NO: 1564 - RNA, 1260 nt, Artificial Sequence
  mRNA product Design i-3 (hSL-A100) comprising derived and/or modified sequence from RVA/Wa-VirWa/P[8]__ACR22783.1__LumSynt_P2_VP8*(65-223) (opt1)
aggagaaagcuuaccaugcagaucuacgagggcaagcugaccgccgaggggcuccgcuucggcaucguggccagccgguucaaccacgcgcuggucgaccgccugguggagggggccaucgacgccaucgugcggcacggcgggcgcgaggaggacaucacccucguccgggugcccggcuccugggagaucccgguggccgccggcgagcuggcgcgcaaggaggacaucgacgccgucaucgccaucggggugcugauccggggcgccacgccccacuucgacuacaucgcgagcgagguguccaaggggcucgccgaccugagccuggagcuccgcaagcccaucaccuucggcgucaucaccgccgacacccuggagcaggccaucgagcgggccgggacgaagcacggcaacaagggcugggaggcggcccuguccgccaucgagauggccaaccucuucaagagccugcgcgggggcuccgggggcagcggcggguccggcgggagcggcgggggccaguacaucaaggccaacuccaaguucaucggcaucaccgagcuggggagcggcuccgggcucgacggccccuaccagccgaccaccuucacgccgcccaacgacuacuggauccugaucaacagcaacaccaacggggugguguacgaguccaccaacaacagcgacuucuggaccgcggucguggccaucgagccccacgugaaccccgucgaccggcaguacacgaucuucggcgaguccaagcaguucaacgugcgcaacgacagcaacaaguggaaguuccuggagauguuccgguccagcagccagaacgaguucuacaaccgccggacccucaccuccgacacccgccuggugggcauccugaaguacgggggccgggucuggacguuccacggggagacgccccgcgccaccaccgacagcuccagcaccgccaaccucaacaacaucuccaucaccauccacagcgaguucuacaucaucccccggucccaggagagcaagugcaacgaguacaucaacaacggccugugaggacuaguuauaagacugacuagcccgaugggccucccaacgggcccuccuccccuccuugcaccgagauuaaucaaaggcucuuuucagagccaccaaaaaaaaaaaaaaaaaaaaaaaaaaaaaaaaaaaaaaaaaaaaaaaaaaaaaaaaaaaaaaaaaaaaaaaaaaaaaaaaaaaaaaaaaaaaaaaaaaaaa

SEQ ID NO: 1565 - RNA, 1260 nt, Artificial Sequence
  mRNA product Design i-3 (hSL-A100) comprising derived and/or modified sequence from RVA/Wa/P[8]__AAA47290.1__LumSynt_P2_VP8*(65-223) (opt1)
aggagaaagcuuaccaugcagaucuacgagggcaagcugaccgccgaggggcuccgcuucggcaucguggccagccgguucaaccacgcgcuggucgaccgccugguggagggggccaucgacgccaucgugcggcacggcgggcgcgaggaggacaucacccucguccgggugcccggcuccugggagaucccgguggccgccggcgagcuggcgcgcaaggaggacaucgacgccgucaucgccaucggggugcugauccggggcgccacgccccacuucgacuacaucgcgagcgagguguccaaggggcucgccgaccugagccuggagcuccgcaagcccaucaccuucggcgucaucaccgccgacacccuggagcaggccaucgagcgggccgggacgaagcacggcaacaagggcugggaggcggcccuguccgccaucgagauggccaaccucuucaagagccugcgcgggggcuccgggggcagcggcggguccggcgggagcggcgggggccaguacaucaaggccaacuccaaguucaucggcaucaccgagcuggggagcggcuccgggcucgacggccccuaccagccgaccaccuucacgccgcccaacgacuacuggauccugaucaacagcaacaccaacggggugguguacgaguccaccaacaacagcgacuucuggaccgcggucguggccaucgagccccacgugaaccccgucgaccggcaguacacgaucuucggcgaguccaagcaguucaacgugagcaacgacuccaacaaguggaaguuccuggagauguuccgcagcagcucccagaacgaguucuacaaccggcgcacccucaccagcgacacccgguucgugggcauccugaaguacgggggccgcgucuggacguuccacggggagacgccccgggccaccaccgacuccagcuccaccgccaaccugaacaacaucagcaucaccauccacuccgaguucuacaucaucccccgcagccaggaguccaagugcaacgaguacaucaacaacggccucugaggacuaguuauaagacugacuagcccgaugggccucccaacgggcccuccuccccuccuugcaccgagauuaaucaaaggcucuuuucagagccaccaaaaaaaaaaaaaaaaaaaaaaaaaaaaaaaaaaaaaaaaaaaaaaaaaaaaaaaaaaaaaaaaaaaaaaaaaaaaaaaaaaaaaaaaaaaaaaaaaaaaa

SEQ ID NO: 1566 - RNA, 1260 nt, Artificial Sequence; identical to SEQ ID NO: 1565
  mRNA product Design i-3 (hSL-A100) comprising derived and/or modified sequence from RVA/Wa/P[8]__AAA66953.1__LumSynt_P2_VP8*(65-223) (opt1)

SEQ ID NO: 1567 - RNA, 1332 nt, Artificial Sequence
  mRNA product Design i-3 (hSL-A100) comprising derived and/or modified sequence from RVA/BE1058/P[4]__AEX30665.1__LumSynt_P2_VP8*(41-223) (opt1)
aggagaaagcuuaccaugcagaucuacgagggcaagcugaccgccgaggggcuccgcuucggcaucguggccagccgguucaaccacgcgcuggucgaccgccugguggagggggccaucgacgccaucgugcggcacggcgggcgcgaggaggacaucacccucguccgggugcccggcuccugggagaucccgguggccgccggcgagcuggcgcgcaaggaggacaucgacgccgucaucgccaucggggugcugauccggggcgccacgccccacuucgacuacaucgcgagcgagguguccaaggggcucgccgaccugagccuggagcuccgcaagcccaucaccuucggcgucaucaccgccgacacccuggagcaggccaucgagcgggccgggacgaagcacggcaacaagggcugggaggcggcccuguccgccaucgagauggccaaccucuucaagagccugcgcgggggcuccgggggcagcggcggguccggcgggagcggcgggggccaguacaucaaggccaacuccaaguucaucggcaucaccgagcuggggagcggcuccggggcgcagacccgguacgcccccgugaacuggggccacggggagaucaacgacagcaccacgguggagccgguccucgacggccccuaccagcccaccaccuucaagcccccgaacgacuacuggcugcugaucuccagcaacaccgacggcgugguguacgaguccacgaacaacagcgacuucuggaccgccgucaucgccguggagccccacgugaaccagaccaaccgccaguacguccucuucggggagaacaagcaguucaacaucgagaacuccagcgacaaguggaaguucuucgagauguucaagggcaacagccaguccgacuucagcaaccggcgcacccugacguccagcaaccggcugguggggaugcucaaguacggcgggcgcguguggaccuuccacggcgagacgccccgggccaccaccgacuccagcuccaccgcggaccugaacaacaucagcaucaucauccacuccgaguucuacaucaucccccgcagccaggaguccaagugcaacgaguacaucaacaacggccugugaggacuaguuauaagacugacuagcccgaugggccucccaacgggcccuccuccccuccuugcaccgagauuaaucaaaggcucuuuucagagccaccaaaaaaaaaaaaaaaaaaaaaaaaaaaaaaaaaaaaaaaaaaaaaaaaaaaaaaaaaaaaaaaaaaaaaaaaaaaaaaaaaaaaaaaaaaaaaaaaaaaaa

SEQ ID NO: 1568 - RNA, 1332 nt, Artificial Sequence
  mRNA product Design i-3 (hSL-A100) comprising derived and/or modified sequence from RVA/DS-1/P[4]__CAD62680.1__LumSynt_P2_VP8*(41-223) (opt1)
aggagaaagcuuaccaugcagaucuacgagggcaagcugaccgccgaggggcuccgcuucggcaucguggccagccgguucaaccacgcgcuggucgaccgccugguggagggggccaucgacgccaucgugcggcacggcgggcgcgaggaggacaucacccucguccgggugcccggcuccugggagaucccgguggccgccggcgagcuggcgcgcaaggaggacaucgacgccgucaucgccaucggggugcugauccggggcgccacgccccacuucgacuacaucgcgagcgagguguccaaggggcucgccgaccugagccuggagcuccgcaagcccaucaccuucggcgucaucaccgccgacacccuggagcaggccaucgagcgggccgggacgaagcacggcaacaagggcugggaggcggcccuguccgccaucgagauggccaaccucuucaagagccugcgcgggggcuccgggggcagcggcggguccggcgggagcggcgggggccaguacaucaaggccaacuccaaguucaucggcaucaccgagcuggggagcggcuccggggcgcagacccgguacgcccccgugaacuggggcagcugggagaucaacgacuccaccacgguggagccgguccucgacgggcccuaccagcccaccaccuucaagcccccgaacgacuacuggcugcugaucagcuccaacaccaacggcgugguguacgagagcacgaacaacaacgacuucuggaccgccgucuccagcguggagccccacgugagccagaccaaccgccaguacauccucuucggcgagaacaagcaguucaacgucgagaacaacuccgacaaguggaaguucuucgagaccuucacggggagcucccagggcaacuucagcaaccggcgcacccugaccuccagcaaccggcugguggggaugcucaaguacggcgggcgcguguggaccuuccacggcgagacgccccgggccaccaccgacuccagcaacaccgccgaccugaacaacaucuccaucaucauccacagcgaguucuacaucaucccccgcucccaggagagcaagugcaacgaguacaucaacaacggccugugaggacuaguuauaagacugacuagcccgaugggccucccaacgggcccuccuccccuccuugcaccgagauuaaucaaaggcucuuuucagagccaccaaaaaaaaaaaaaaaaaaaaaaaaaaaaaaaaaaaaaaaaaaaaaaaaaaaaaaaaaaaaaaaaaaaaaaaaaaaaaaaaaaaaaaaaaaaaaaaaaaaaa

SEQ ID NO: 1569 - RNA, 1332 nt, Artificial Sequence; identical to SEQ ID NO: 1568
  mRNA product Design i-3 (hSL-A100) comprising derived and/or modified sequence from RVA/DS-1/P[4]__ABV53252.1__LumSynt_P2_VP8*(41-223) (opt1)

SEQ ID NO: 1570 - RNA, 1332 nt, Artificial Sequence
  mRNA product Design i-3 (hSL-A100) comprising derived and/or modified sequence from RVA/F01322/P[6]__AFA51886.1__LumSynt_P2_VP8*(41-223) (opt1)
aggagaaagcuuaccaugcagaucuacgagggcaagcugaccgccgaggggcuccgcuucggcaucguggccagccgguucaaccacgcgcuggucgaccgccugguggagggggccaucgacgccaucgugcggcacggcgggcgcgaggaggacaucacccucguccgggugcccggcuccugggagaucccgguggccgccggcgagcuggcgcgcaaggaggacaucgacgccgucaucgccaucggggugcugauccggggcgccacgccccacuucgacuacaucgcgagcgagguguccaaggggcucgccgaccugagccuggagcuccgcaagcccaucaccuucggcgucaucaccgccgacacccuggagcaggccaucgagcgggccgggacgaagcacggcaacaagggcugggaggcggcccuguccgccaucgagauggccaaccucuucaagagccugcgcgggggcuccgggggcagcggcggguccggcgggagcggcgggggccaguacaucaaggccaacuccaaguucaucggcaucaccgagcuggggagcggcuccggggcgcagaccaacuacgcccccgugaccuggagccacggcgaggugaacgacuccacgaccaucgagccgguccucgacgggcccuaccagcccaccaacuucaagcccccgaacgacuacuggauccugcugaaccccaccaaccagcaggucgugcucgagggcacgaacaagaccgacaucuggguggcccugcugcucguggagcccaacgugaccaaccagagccggcaguacacccuguucggcgagacgaagcagaucaccgucgagaacaacaccaacaaguggaaguucuucgagauguuccgcuccagcguguccgccgaguuccagcacaagcggacccugacgagcgacaccaagcucgccggguucaugaaguucuacaacagcguguggaccuuccacggcgagacccccaacgcgacgaccgacuacuccagcaccuccaaccuguucgaggucgagaccgugauccacguggaguucuacaucaucccgcgcagccaggaguccaagugcagcgaguacaucaacacggggcugugaggacuaguuauaagacugacuagcccgaugggccucccaacgggcccuccuccccuccuugcaccgagauuaaucaaaggcucuuuucagagccaccaaaaaaaaaaaaaaaaaaaaaaaaaaaaaaaaaaaaaaaaaaaaaaaaaaaaaaaaaaaaaaaaaaaaaaaaaaaaaaaaaaaaaaaaaaaaaaaaaaaaa

SEQ ID NO: 1571 - RNA, 1332 nt, Artificial Sequence
  mRNA product Design i-3 (hSL-A100) comprising derived and/or modified sequence from RVA/1076/P[6]__AAA47337.1__LumSynt_P2_VP8*(41-223) (opt1)
aggagaaagcuuaccaugcagaucuacgagggcaagcugaccgccgaggggcuccgcuucggcaucguggccagccgguucaaccacgcgcuggucgaccgccugguggagggggccaucgacgccaucgugcggcacggcgggcgcgaggaggacaucacccucguccgggugcccggcuccugggagaucccgguggccgccggcgagcuggcgcgcaaggaggacaucgacgccgucaucgccaucggggugcugauccggggcgccacgccccacuucgacuacaucgcgagcgagguguccaaggggcucgccgaccugagccuggagcuccgcaagcccaucaccuucggcgucaucaccgccgacacccuggagcaggccaucgagcgggccgggacgaagcacggcaacaagggcugggaggcggcccuguccgccaucgagauggccaaccucuucaagagccugcgcgggggcuccgggggcagcggcggguccggcgggagcggcgggggccaguacaucaaggccaacuccaaguucaucggcaucaccgagcuggggagcggcuccggggcgcagaccaacuacgcccccgugaccuggagccacggcgaggugaacgacuccacgaccaucgagccgguccucgacgggcccuaccagcccaccagcuucaagcccccguccgacuacuggauccugcugaaccccaccaaccagcaggucgugcucgagggcacgaacaagaccgacaucuggguggcccugcugcucguggagcccaacgugaccaaccagagccggcaguacacccuguucggcgagacgaagcagaucaccgucgagaacaacaccaacaaguggaaguucuucgagauguuccgcuccagcgugagcgccgaguuccagcacaagcggacccugacguccgacaccaagcucgccggguuccugaaguucuacaacagcguguggaccuucuacggcgagacgccccacgcgaccaccgacuacuccagcaccuccaaccugagcgaggucgagaccgccauccacguggaguucuacaucaucccgcgcucccaggagagcaagugcaacgaguacaucaacacggggcucugaggacuaguuauaagacugacuagcccgaugggccucccaacgggcccuccuccccuccuugcaccgagauuaaucaaaggcucuuuucagagccaccaaaaaaaaaaaaaaaaaaaaaaaaaaaaaaaaaaaaaaaaaaaaaaaaaaaaaaaaaaaaaaaaaaaaaaaaaaaaaaaaaaaaaaaaaaaaaaaaaaaaa

SEQ ID NO: 1572 - RNA, 1332 nt, Artificial Sequence
  mRNA product Design i-3 (hSL-A100) comprising derived and/or modified sequence from RVA/BE1128/P[8]__AEX30671.1__LumSynt_P2_VP8*(41-223) (opt1)
aggagaaagcuuaccaugcagaucuacgagggcaagcugaccgccgaggggcuccgcuucggcaucguggccagccgguucaaccacgcgcuggucgaccgccugguggagggggccaucgacgccaucgugcggcacggcgggcgcgaggaggacaucacccucguccgggugcccggcuccugggagaucccgguggccgccggcgagcuggcgcgcaaggaggacaucgacgccgucaucgccaucggggugcugauccggggcgccacgccccacuucgacuacaucgcgagcgagguguccaaggggcucgccgaccugagccuggagcuccgcaagcccaucaccuucggcgucaucaccgccgacacccuggagcaggccaucgagcgggccgggacgaagcacggcaacaagggcugggaggcggcccuguccgccaucgagauggccaaccucuucaagagccugcgcgggggcuccgggggcagcggcggguccggcgggagcggcgggggccaguacaucaaggccaacuccaaguucaucggcaucaccgagcuggggagcggcuccggggcgcagacccgguacgcccccgugaacuggggccacggggagaucaacgacagcaccacgguggagccgauccucgacggccccuaccagcccaccaccuucacgcccccgaccgacuacuggauccugaucaccuccaacaccaacggcgucguguacgagagcaccaacaacuccgacuucuggacggccgugaucgccgucgagccccacgugaaccccguggaccgccaguacaacgucuucggggagaacaagcaguucaacgugcggaacgacagcgacaaguggaaguuccuggagauguuccgcggcuccagccagaacgacuucuacaaccggcgcacccucaccagcgacacccggcugguggggauccugaaguacggcgggcgcgucuggacguuccacggcgagacgccccgggccaccaccgacuccagcaacaccgcgaaccucgacggcaucuccaucaccauccacagcgaguucuacaucaucccgcgcucccaggagagcaagugcaacgaguacaucaacaacgggcugugaggacuaguuauaagacugacuagcccgaugggccucccaacgggcccuccuccccuccuugcaccgagauuaaucaaaggcucuuuucagagccaccaaaaaaaaaaaaaaaaaaaaaaaaaaaaaaaaaaaaaaaaaaaaaaaaaaaaaaaaaaaaaaaaaaaaaaaaaaaaaaaaaaaaaaaaaaaaaaaaaaaaa

SEQ ID NO: 1573 - RNA, 1332 nt, Artificial Sequence
  mRNA product Design i-3 (hSL-A100) comprising derived and/or modified sequence from RVA/Wa-VirWa/P[8]__ACR22783.1__LumSynt_P2_VP8*(41-223) (opt1)
aggagaaagcuuaccaugcagaucuacgagggcaagcugaccgccgaggggcuccgcuucggcaucguggccagccgguucaaccacgcgcuggucgaccgccugguggagggggccaucgacgccaucgugcggcacggcgggcgcgaggaggacaucacccucguccgggugcccggcuccugggagaucccgguggccgccggcgagcuggcgcgcaaggaggacaucgacgccgucaucgccaucggggugcugauccggggcgccacgccccacuucgacuacaucgcgagcgagguguccaaggggcucgccgaccugagccuggagcuccgcaagcccaucaccuucggcgucaucaccgccgacacccuggagcaggccaucgagcgggccgggacgaagcacggcaacaagggcugggaggcggcccuguccgccaucgagauggccaaccucuucaagagccugcgcgggggcuccgggggcagcggcggguccggcgggagcggcgggggccaguacaucaaggccaacuccaaguucaucggcaucaccgagcuggggagcggcuccggggcgcagacccgguacgcccccgugaacuggggccacggggagaucaacgacagcaccacgguggagccgauccucgacggccccuaccagcccaccaccuucacgcccccgaacgacuacuggauccugaucaacuccaacaccaacggcgucguguacgagagcaccaacaacuccgacuucuggaccgccguggucgccaucgagccccacgugaaccccguggaccgccaguacaccaucuucggggagagcaagcaguucaacguccggaacgacuccaacaaguggaaguuccuggagauguuccgcagcagcucccagaacgaguucuacaaccggcgcacgcucaccagcgacacccggcuggugggcauccugaaguacgggggccgcguguggaccuuccacggggagacgccccgggccaccaccgacuccagcuccaccgcgaaccucaacaacaucagcaucacgauccacuccgaguucuacaucaucccgcgcagccaggaguccaagugcaacgaguacaucaacaacggccugugaggacuaguuauaagacugacuagcccgaugggccucccaacgggcccuccuccccuccuugcaccgagauuaaucaaaggcucuuuucagagccaccaaaaaaaaaaaaaaaaaaaaaaaaaaaaaaaaaaaaaaaaaaaaaaaaaaaaaaaaaaaaaaaaaaaaaaaaaaaaaaaaaaaaaaaaaaaaaaaaaaaaa

SEQ ID NO: 1574 - RNA, 1332 nt, Artificial Sequence
  mRNA product Design i-3 (hSL-A100) comprising derived and/or modified sequence from RVA/Wa/P[8]__AAA47290.1__LumSynt_P2_VP8*(41-223) (opt1)
aggagaaagcuuaccaugcagaucuacgagggcaagcugaccgccgaggggcuccgcuucggcaucguggccagccgguucaaccacgcgcuggucgaccgccugguggagggggccaucgacgccaucgugcggcacggcgggcgcgaggaggacaucacccucguccgggugcccggcuccugggagaucccgguggccgccggcgagcuggcgcgcaaggaggacaucgacgccgucaucgccaucggggugcugauccggggcgccacgccccacuucgacuacaucgcgagcgagguguccaaggggcucgccgaccugagccuggagcuccgcaagcccaucaccuucggcgucaucaccgccgacacccuggagcaggccaucgagcgggccgggacgaagcacggcaacaagggcugggaggcggcccuguccgccaucgagauggccaaccucuucaagagccugcgcgggggcuccgggggcagcggcggguccggcgggagcggcgggggccaguacaucaaggccaacuccaaguucaucggcaucaccgagcuggggagcggcuccggggcgcagacccgguacgcccccgugaacuggggccacggggagaucaacgacagcaccacgguggagccgauccucgacggccccuaccagcccaccaccuucacgcccccgaacgacuacuggauccugaucaacuccaacaccaacggcgucguguacgagagcaccaacaacuccgacuucuggaccgccguggucgccaucgagccccacgugaaccccguggaccgccaguacaccaucuucggggagagcaagcaguucaacgucuccaacgacagcaacaaguggaaguuccuggagauguuccggagcuccagccagaacgaguucuacaaccgccggacgcucaccuccgacacccgcuucgugggcauccugaaguacgggggccggguguggaccuuccacggggagacgccccgcgccaccaccgacagcuccagcaccgcgaaccugaacaacaucuccaucacgauccacagcgaguucuacaucaucccgcggucccaggagagcaagugcaacgaguacaucaacaacggccucugaggacuaguuauaagacugacuagcccgaugggccucccaacgggcccuccuccccuccuugcaccgagauuaaucaaaggcucuuuucagagccaccaaaaaaaaaaaaaaaaaaaaaaaaaaaaaaaaaaaaaaaaaaaaaaaaaaaaaaaaaaaaaaaaaaaaaaaaaaaaaaaaaaaaaaaaaaaaaaaaaaaaa

SEQ ID NO: 1575 - RNA, 1332 nt, Artificial Sequence
  mRNA product Design i-3 (hSL-A100) comprising derived and/or modified sequence from RVA/Wa/P[8]__AAA66953.1__LumSynt_P2_VP8*(41-223) (opt1)
aggagaaagcuuaccaugcagaucuacgagggcaagcugaccgccgaggggcuccgcuucggcaucguggccagccgguucaaccacgcgcuggucgaccgccugguggagggggccaucgacgccaucgugcggcacggcgggcgcgaggaggacaucacccucguccgggugcccggcuccugggagaucccgguggccgccggcgagcuggcgcgcaaggaggacaucgacgccgucaucgccaucggggugcugauccggggcgccacgccccacuucgacuacaucgcgagcgagguguccaaggggcucgccgaccugagccuggagcuccgcaagcccaucaccuucggcgucaucaccgccgacacccuggagcaggccaucgagcgggccgggacgaagcacggcaacaagggcugggaggcggcccuguccgccaucgagauggccaaccucuucaagagccugcgcgggggcuccgggggcagcggcggguccggcgggagcggcgggggccaguacaucaaggccaacuccaaguucaucggcaucaccgagcuggggagcggcuccggggcgcagacccgguacgcccccgugaacuggggccacggggagaucaacgacagcaccacgguggagccgaugcucgacggccccuaccagcccaccaccuucacgcccccgaacgacuacuggauccugaucaacuccaacaccaacggcgucguguacgagagcaccaacaacuccgacuucuggaccgccguggucgccaucgagccccacgugaaccccguggaccgccaguacaccaucuucggggagagcaagcaguucaacgucuccaacgacagcaacaaguggaaguuccuggagauguuccggagcuccagccagaacgaguucuacaaccgccggacgcucaccuccgacacccgcuucgugggcauccugaaguacgggggccggguguggaccuuccacggggagacgccccgcgccaccaccgacagcuccagcaccgcgaaccugaacaacaucuccaucacgauccacagcgaguucuacaucaucccgcggucccaggagagcaagugcaacgaguacaucaacaacggccucugaggacuaguuauaagacugacuagcccgaugggccucccaacgggcccuccuccccuccuugcaccgagauuaaucaaaggcucuuuucagagccaccaaaaaaaaaaaaaaaaaaaaaaaaaaaaaaaaaaaaaaaaaaaaaaaaaaaaaaaaaaaaaaaaaaaaaaaaaaaaaaaaaaaaaaaaaaaaaaaaaaaaa

SEQ ID NO: 1576 - RNA, 807 nt, Artificial Sequence
  mRNA product Design i-3 (hSL-A100) comprising derived and/or modified sequence from RVA/BE1058/P[4]__AEX30665.1__SP-IgE_P2_VP8*(65-223) (opt1)
aggagaaagcuuaccauggacuggaccuggauccuguuccucguggccgccgcgacccgcguccacagccaguacaucaaggccaacuccaaguucaucggcaucacggagcuggggagcggcuccgggcuggacggccccuaccagccgaccaccuucaagccgcccaacgacuacuggcuccugaucagcuccaacaccgacggggugguguacgagagcacgaacaacuccgacuucuggaccgccgucaucgccguggagccccacgugaaccagaccaaccggcaguacguccuguucggcgagaacaagcaguucaacaucgagaacagcuccgacaaguggaaguucuucgagauguucaagggcaacagccaguccgacuucagcaaccgccggacccucacguccagcaaccgccugguggggaugcugaaguacggcgggcggguguggaccuuccacggcgagacgccccgcgccaccaccgacuccagcuccaccgcggaccucaacaacaucagcaucaucauccacuccgaguucuacaucaucccccggagccaggagagcaagugcaacgaguacaucaacaacgggcugugaggacuaguuauaagacugacuagcccgaugggccucccaacgggcccuccuccccuccuugcaccgagauuaaucaaaggcucuuuucagagccaccaaaaaaaaaaaaaaaaaaaaaaaaaaaaaaaaaaaaaaaaaaaaaaaaaaaaaaaaaaaaaaaaaaaaaaaaaaaaaaaaaaaaaaaaaaaaaaaaaaaaa

SEQ ID NO: 1577 - RNA, 807 nt, Artificial Sequence
  mRNA product Design i-3 (hSL-A100) comprising derived and/or modified sequence from RVA/DS-1/P[4]__CAD62680.1__SP-IgE_P2_VP8*(65-223) (opt1)
aggagaaagcuuaccauggacuggaccuggauccuguuccucguggccgccgcgacccgcguccacagccaguacaucaaggccaacuccaaguucaucggcaucacggagcuggggagcggcuccgggcuggacggccccuaccagccgaccaccuucaagccgcccaacgacuacuggcuccugaucagcuccaacaccaacggggugguguacgagagcacgaacaacaacgacuucuggaccgccgucuccagcguggagccccacgugucccagaccaaccggcaguacauccuguucggcgagaacaagcaguucaacgucgagaacaacagcgacaaguggaaguucuucgagaccuucacgggcuccagccaggggaacuucuccaaccgccggacccucaccagcuccaaccgccuggugggcaugcugaaguacgggggccggguguggaccuuccacggggagacgccccgcgccaccaccgacagcuccaacaccgccgaccucaacaacaucagcaucaucauccacuccgaguucuacaucaucccccggagccaggagagcaagugcaacgaguacaucaacaacggccugugaggacuaguuauaagacugacuagcccgaugggccucccaacgggcccuccuccccuccuugcaccgagauuaaucaaaggcucuuuucagagccaccaaaaaaaaaaaaaaaaaaaaaaaaaaaaaaaaaaaaaaaaaaaaaaaaaaaaaaaaaaaaaaaaaaaaaaaaaaaaaaaaaaaaaaaaaaaaaaaaaaaaa

SEQ ID NO: 1578 - RNA, 807 nt, Artificial Sequence; identical to SEQ ID NO: 1577
  mRNA product Design i-3 (hSL-A100) comprising derived and/or modified sequence from RVA/DS-1/P[4]__ABV53252.1__SP-IgE_P2_VP8*(65-223) (opt1)

SEQ ID NO: 1579 - RNA, 807 nt, Artificial Sequence
  mRNA product Design i-3 (hSL-A100) comprising derived and/or modified sequence from RVA/F01322/P[6]__AFA51886.1__SP-IgE_P2_VP8*(65-223) (opt1)
aggagaaagcuuaccauggacuggaccuggauccuguuccucguggccgccgcgacccgcguccacagccaguacaucaaggccaacuccaaguucaucggcaucacggagcuggggagcggcuccgggcuggacggccccuaccagccgaccaacuucaagccgcccaacgacuacuggauccuccugaaccccaccaaccagcaggucgugcuggaggggaccaacaagacggacaucuggguggcccuccugcugguggagcccaacgugaccaaccagagccggcaguacacccucuucggcgagaccaagcagaucacggucgagaacaacaccaacaaguggaaguucuucgagauguuccgcuccagcguguccgccgaguuccagcacaagcggacccugaccagcgacacgaagcuggccggcuucaugaaguucuacaacuccguguggaccuuccacggggagacccccaacgcgaccacggacuacagcuccaccagcaaccucuucgaggucgagaccgugauccacguggaguucuacaucaucccccgcucccaggagagcaagugcuccgaguacaucaacaccggccugugaggacuaguuauaagacugacuagcccgaugggccucccaacgggcccuccuccccuccuugcaccgagauuaaucaaaggcucuuuucagagccaccaaaaaaaaaaaaaaaaaaaaaaaaaaaaaaaaaaaaaaaaaaaaaaaaaaaaaaaaaaaaaaaaaaaaaaaaaaaaaaaaaaaaaaaaaaaaaaaaaaaaa

SEQ ID NO: 1580 - RNA, 807 nt, Artificial Sequence
  mRNA product Design i-3 (hSL-A100) comprising derived and/or modified sequence from RVA/1076/P[6]__AAA47337.1__SP-IgE_P2_VP8*(65-223) (opt1)
aggagaaagcuuaccauggacuggaccuggauccuguuccucguggccgccgcgacccgcguccacagccaguacaucaaggccaacuccaaguucaucggcaucacggagcuggggagcggcuccgggcuggacggccccuaccagccgaccagcuucaagccgcccuccgacuacuggauccuccugaaccccaccaaccagcaggucgugcuggaggggaccaacaagacggacaucuggguggcccuccugcugguggagcccaacgugaccaaccagagccggcaguacacccucuucggcgagaccaagcagaucacggucgagaacaacaccaacaaguggaaguucuucgagauguuccgcuccagcguguccgccgaguuccagcacaagcggacccugaccagcgacacgaagcuggccggcuuccucaaguucuacaacuccguguggaccuucuacggggagacgccccacgcgaccaccgacuacagcuccaccagcaaccuguccgaggucgagaccgccauccacguggaguucuacaucaucccccgcagccaggaguccaagugcaacgaguacaucaacaccggccugugaggacuaguuauaagacugacuagcccgaugggccucccaacgggcccuccuccccuccuugcaccgagauuaaucaaaggcucuuuucagagccaccaaaaaaaaaaaaaaaaaaaaaaaaaaaaaaaaaaaaaaaaaaaaaaaaaaaaaaaaaaaaaaaaaaaaaaaaaaaaaaaaaaaaaaaaaaaaaaaaaaaaa

SEQ ID NO: 1581 - RNA, 807 nt, Artificial Sequence
  mRNA product Design i-3 (hSL-A100) comprising derived and/or modified sequence from RVA/BE1128/P[8]__AEX30671.1__SP-IgE_P2_VP8*(65-223) (opt1)
aggagaaagcuuaccauggacuggaccuggauccuguuccucguggccgccgcgacccgcguccacagccaguacaucaaggccaacuccaaguucaucggcaucacggagcuggggagcggcuccgggcuggacggccccuaccagccgaccaccuucaccccgcccacggacuacuggauccucaucaccagcaacaccaacggggugguguacgaguccaccaacaacagcgacuucuggacggccgucaucgccguggagccccacgugaaccccgucgaccggcaguacaacguguucggcgagaacaagcaguucaacgugcgcaacgacuccgacaaguggaaguuccuggagauguuccggggcagcucccagaacgacuucuacaaccgccggacccugaccagcgacacccgccucgucgggauccugaaguacggcgggcggguguggacguuccacggcgagacgccccgcgccaccaccgacuccagcaacaccgcgaaccuggacgggaucuccaucaccauccacagcgaguucuacaucaucccccggucccaggagagcaagugcaacgaguacaucaacaacggccucugaggacuaguuauaagacugacuagcccgaugggccucccaacgggcccuccuccccuccuugcaccgagauuaaucaaaggcucuuuucagagccaccaaaaaaaaaaaaaaaaaaaaaaaaaaaaaaaaaaaaaaaaaaaaaaaaaaaaaaaaaaaaaaaaaaaaaaaaaaaaaaaaaaaaaaaaaaaaaaaaaaaaa

SEQ ID NO: 1582 - RNA, 807 nt, Artificial Sequence
  mRNA product Design i-3 (hSL-A100) comprising derived and/or modified sequence from RVA/Wa-VirWa/P[8]__ACR22783.1__SP-IgE_P2_VP8*(65-223) (opt1)
aggagaaagcuuaccauggacuggaccuggauccuguuccucguggccgccgcgacccgcguccacagccaguacaucaaggccaacuccaaguucaucggcaucacggagcuggggagcggcuccgggcuggacggccccuaccagccgaccaccuucaccccgcccaacgacuacuggauccucaucaacagcaacacgaacggggugguguacgaguccaccaacaacagcgacuucuggaccgccgucguggccaucgagccccacgugaaccccgucgaccggcaguacaccaucuucggcgaguccaagcaguucaacgugcgcaacgacagcaacaaguggaaguuccuggagauguuccgguccagcucccagaacgaguucuacaaccgccggacgcugaccagcgacacccgccucgugggcauccugaaguacgggggccgggucuggaccuuccacggggagacgccccgcgccaccaccgacuccagcuccaccgcgaaccugaacaacaucagcaucacgauccacuccgaguucuacaucaucccccggagccaggaguccaagugcaacgaguacaucaacaacggccucugaggacuaguuauaagacugacuagcccgaugggccucccaacgggcccuccuccccuccuugcaccgagauuaaucaaaggcucuuuucagagccaccaaaaaaaaaaaaaaaaaaaaaaaaaaaaaaaaaaaaaaaaaaaaaaaaaaaaaaaaaaaaaaaaaaaaaaaaaaaaaaaaaaaaaaaaaaaaaaaaaaaaa

SEQ ID NO: 1583 - RNA, 807 nt, Artificial Sequence
  mRNA product Design i-3 (hSL-A100) comprising derived and/or modified sequence from RVA/Wa/P[8]__AAA47290.1__SP-IgE_P2_VP8*(65-223) (opt1)
aggagaaagcuuaccauggacuggaccuggauccuguuccucguggccgccgcgacccgcguccacagccaguacaucaaggccaacuccaaguucaucggcaucacggagcuggggagcggcuccgggcuggacggccccuaccagccgaccaccuucaccccgcccaacgacuacuggauccucaucaacagcaacacgaacggggugguguacgaguccaccaacaacagcgacuucuggaccgccgucguggccaucgagccccacgugaaccccgucgaccggcaguacaccaucuucggcgaguccaagcaguucaacgugagcaacgacuccaacaaguggaaguuccuggagauguuccgcagcuccagccagaacgaguucuacaaccggcgcacgcugaccuccgacacccgguucgugggcauccucaaguacgggggccgcgucuggaccuuccacggggagacgccccgggccaccaccgacagcuccagcaccgcgaaccugaacaacaucuccaucacgauccacagcgaguucuacaucaucccccgcucccaggagagcaagugcaacgaguacaucaacaacggccugugaggacuaguuauaagacugacuagcccgaugggccucccaacgggcccuccuccccuccuugcaccgagauuaaucaaaggcucuuuucagagccaccaaaaaaaaaaaaaaaaaaaaaaaaaaaaaaaaaaaaaaaaaaaaaaaaaaaaaaaaaaaaaaaaaaaaaaaaaaaaaaaaaaaaaaaaaaaaaaaaaaaaa

SEQ ID NO: 1584 - RNA, 807 nt, Artificial Sequence; identical to SEQ ID NO: 1583
  mRNA product Design i-3 (hSL-A100) comprising derived and/or modified sequence from RVA/Wa/P[8]__AAA66953.1__SP-IgE_P2_VP8*(65-223) (opt1)

SEQ ID NO: 1585 - RNA, 879 nt, Artificial Sequence
  mRNA product Design i-3 (hSL-A100) comprising derived and/or modified sequence from RVA/BE1058/P[4]__AEX30665.1__SP-IgE_P2_VP8*(41-223) (opt1)
aggagaaagcuuaccauggacuggaccuggauccuguuccucguggccgccgcgacccgcguccacagccaguacaucaaggccaacuccaaguucaucggcaucacggagcuggggagcggcuccggggcccagacccgguacgcccccgugaacuggggccacggggagaucaacgacagcaccaccguggagccgguccuggacggccccuaccagcccacgaccuucaagcccccgaacgacuacuggcuccugaucuccagcaacaccgacggcgugguguacgaguccaccaacaacagcgacuucuggacggccgucaucgcgguggagccccacgugaaccagaccaaccgccaguacguccuguucggggagaacaagcaguucaacaucgagaacuccagcgacaaguggaaguucuucgagauguucaagggcaacucccagagcgacuucuccaaccggcgcacccucaccagcuccaaccggcugguggggaugcugaaguacggcgggcgcguguggacguuccacggcgagacgccccgggccaccaccgacagcuccagcaccgccgaccucaacaacaucuccaucaucauccacagcgaguucuacaucaucccccgcagccaggaguccaagugcaacgaguacaucaacaacggccugugaggacuaguuauaagacugacuagcccgaugggccucccaacgggcccuccuccccuccuugcaccgagauuaaucaaaggcucuuuucagagccaccaaaaaaaaaaaaaaaaaaaaaaaaaaaaaaaaaaaaaaaaaaaaaaaaaaaaaaaaaaaaaaaaaaaaaaaaaaaaaaaaaaaaaaaaaaaaaaaaaaaaa

SEQ ID NO: 1586 - RNA, 879 nt, Artificial Sequence
  mRNA product Design i-3 (hSL-A100) comprising derived and/or modified sequence from RVA/DS-1/P[4]__CAD62680.1__SP-IgE_P2_VP8*(41-223) (opt1)
aggagaaagcuuaccauggacuggaccuggauccuguuccucguggccgccgcgacccgcguccacagccaguacaucaaggccaacuccaaguucaucggcaucacggagcuggggagcggcuccggggcccagacccgguacgcccccgugaacuggggcagcugggagaucaacgacuccaccaccguggagccgguccuggacgggcccuaccagcccacgaccuucaagcccccgaacgacuacuggcuccugaucagcuccaacaccaacggcgugguguacgagagcaccaacaacaacgacuucuggacggccgucuccagcguggagccccacgugucccagaccaaccgccaguacauccuguucggcgagaacaagcaguucaacgucgagaacaacagcgacaaguggaaguucuucgagaccuucaccggguccagccagggcaacuucuccaaccggcgcacgcucaccagcuccaaccggcugguggggaugcugaaguacggcgggcgcguguggaccuuccacggcgagacgccccgggcgaccaccgacagcuccaacaccgccgaccucaacaacaucagcaucaucauccacagcgaguucuacaucaucccccgcucccaggagagcaagugcaacgaguacaucaacaacggccugugaggacuaguuauaagacugacuagcccgaugggccucccaacgggcccuccuccccuccuugcaccgagauuaaucaaaggcucuuuucagagccaccaaaaaaaaaaaaaaaaaaaaaaaaaaaaaaaaaaaaaaaaaaaaaaaaaaaaaaaaaaaaaaaaaaaaaaaaaaaaaaaaaaaaaaaaaaaaaaaaaaaaa

SEQ ID NO: 1587 - RNA, 879 nt, Artificial Sequence; identical to SEQ ID NO: 1586
  mRNA product Design i-3 (hSL-A100) comprising derived and/or modified sequence from RVA/DS-1/P[4]__ABV53252.1__SP-IgE_P2_VP8*(41-223) (opt1)

SEQ ID NO: 1588 - RNA, 879 nt, Artificial Sequence
  mRNA product Design i-3 (hSL-A100) comprising derived and/or modified sequence from RVA/F01322/P[6]__AFA51886.1__SP-IgE_P2_VP8*(41-223) (opt1)
aggagaaagcuuaccauggacuggaccuggauccuguuccucguggccgccgcgacccgcguccacagccaguacaucaaggccaacuccaaguucaucggcaucacggagcuggggagcggcuccggggcccagaccaacuacgcccccgugaccuggagccacggcgaggugaacgacuccaccacgaucgagccgguccuggacgggcccuaccagcccaccaacuucaagcccccgaacgacuacuggauccuccugaaccccaccaaccagcaggucgugcuggagggcaccaacaagacggacaucuggguggcccuccugcugguggagcccaacgugaccaaccagagccggcaguacacccucuucggcgagaccaagcagaucacggucgagaacaacaccaacaaguggaaguucuucgagauguuccgcuccagcguguccgcggaguuccagcacaagcggacccugaccagcgacacgaagcuggccggguucaugaaguucuacaacuccguguggaccuuccacggcgagacccccaacgccaccacggacuacagcuccaccagcaaccucuucgaggucgagaccgugauccacguggaguucuacaucaucccgcgcucccaggagagcaagugcuccgaguacaucaacaccgggcugugaggacuaguuauaagacugacuagcccgaugggccucccaacgggcccuccuccccuccuugcaccgagauuaaucaaaggcucuuuucagagccaccaaaaaaaaaaaaaaaaaaaaaaaaaaaaaaaaaaaaaaaaaaaaaaaaaaaaaaaaaaaaaaaaaaaaaaaaaaaaaaaaaaaaaaaaaaaaaaaaaaaaa

SEQ ID NO: 1589 - RNA, 879 nt, Artificial Sequence
  mRNA product Design i-3 (hSL-A100) comprising derived and/or modified sequence from RVA/1076/P[6]__AAA47337.1__SP-IgE_P2_VP8*(41-223) (opt1)
aggagaaagcuuaccauggacuggaccuggauccuguuccucguggccgccgcgacccgcguccacagccaguacaucaaggccaacuccaaguucaucggcaucacggagcuggggagcggcuccggggcccagaccaacuacgcccccgugaccuggagccacggcgaggugaacgacuccaccacgaucgagccgguccuggacgggcccuaccagcccaccagcuucaagcccccguccgacuacuggauccuccugaaccccaccaaccagcaggucgugcuggagggcaccaacaagacggacaucuggguggcccuccugcugguggagcccaacgugaccaaccagagccggcaguacacccucuucggcgagaccaagcagaucacggucgagaacaacaccaacaaguggaaguucuucgagauguuccgcuccagcguguccgcggaguuccagcacaagcggacccugaccagcgacacgaagcuggccggguuccucaaguucuacaacuccguguggaccuucuacggcgagacgccccacgccaccaccgacuacagcuccaccagcaaccuguccgaggucgagaccgccauccacguggaguucuacaucaucccgcgcagccaggaguccaagugcaacgaguacaucaacaccgggcugugaggacuaguuauaagacugacuagcccgaugggccucccaacgggcccuccuccccuccuugcaccgagauuaaucaaaggcucuuuucagagccaccaaaaaaaaaaaaaaaaaaaaaaaaaaaaaaaaaaaaaaaaaaaaaaaaaaaaaaaaaaaaaaaaaaaaaaaaaaaaaaaaaaaaaaaaaaaaaaaaaaaaa

SEQ ID NO: 1590 - RNA, 879 nt, Artificial Sequence
  mRNA product Design i-3 (hSL-A100) comprising derived and/or modified sequence from RVA/BE1128/P[8]__AEX30671.1__SP-IgE_P2_VP8*(41-223) (opt1)
aggagaaagcuuaccauggacuggaccuggauccuguuccucguggccgccgcgacccgcguccacagccaguacaucaaggccaacuccaaguucaucggcaucacggagcuggggagcggcuccggggcccagacccgguacgcccccgugaacuggggccacggggagaucaacgacagcaccaccguggagccgauccuggacggccccuaccagcccacgaccuucacgcccccgaccgacuacuggauccucaucaccuccaacaccaacggcgucguguacgagagcaccaacaacuccgacuucuggaccgccgugaucgcggucgagccccacgugaaccccguggaccgccaguacaacgucuucggggagaacaagcaguucaacgugcggaacgacagcgacaaguggaaguuccuggagauguuccgcggcuccagccagaacgacuucuacaaccggcgcacgcugaccuccgacacccggcucguggggauccugaaguacggcgggcgcgucuggaccuuccacggcgagacgccccgggccaccaccgacagcuccaacaccgccaaccuggacggcaucagcaucacgauccacuccgaguucuacaucaucccgcgcagccaggaguccaagugcaacgaguacaucaacaacgggcucugaggacuaguuauaagacugacuagcccgaugggccucccaacgggcccuccuccccuccuugcaccgagauuaaucaaaggcucuuuucagagccaccaaaaaaaaaaaaaaaaaaaaaaaaaaaaaaaaaaaaaaaaaaaaaaaaaaaaaaaaaaaaaaaaaaaaaaaaaaaaaaaaaaaaaaaaaaaaaaaaaaaaa

SEQ ID NO: 1591 - RNA, 879 nt, Artificial Sequence
  mRNA product Design i-3 (hSL-A100) comprising derived and/or modified sequence from RVA/Wa-VirWa/P[8]__ACR22783.1__SP-IgE_P2_VP8*(41-223) (opt1)
aggagaaagcuuaccauggacuggaccuggauccuguuccucguggccgccgcgacccgcguccacagccaguacaucaaggccaacuccaaguucaucggcaucacggagcuggggagcggcuccggggcccagacccgguacgcccccgugaacuggggccacggggagaucaacgacagcaccaccguggagccgauccuggacggccccuaccagcccacgaccuucacgcccccgaacgacuacuggauccucaucaacuccaacaccaacggcgucguguacgagagcaccaacaacuccgacuucuggaccgccguggucgcgaucgagccccacgugaaccccguggaccgccaguacaccaucuucggggagagcaagcaguucaacguccggaacgacuccaacaaguggaaguuccuggagauguuccgcagcuccagccagaacgaguucuacaaccggcgcacccugacguccgacacccggcucgugggcauccugaaguacgggggccgcguguggaccuuccacggggagacgccccgggccaccaccgacagcuccagcaccgccaaccugaacaacaucuccaucaccauccacagcgaguucuacaucaucccgcgcucccaggagagcaagugcaacgaguacaucaacaacggccucugaggacuaguuauaagacugacuagcccgaugggccucccaacgggcccuccuccccuccuugcaccgagauuaaucaaaggcucuuuucagagccaccaaaaaaaaaaaaaaaaaaaaaaaaaaaaaaaaaaaaaaaaaaaaaaaaaaaaaaaaaaaaaaaaaaaaaaaaaaaaaaaaaaaaaaaaaaaaaaaaaaaaa

SEQ ID NO: 1592 - RNA, 879 nt, Artificial Sequence
  mRNA product Design i-3 (hSL-A100) comprising derived and/or modified sequence from RVA/Wa/P[8]__AAA47290.1__SP-IgE_P2_VP8*(41-223) (opt1)
aggagaaagcuuaccauggacuggaccuggauccuguuccucguggccgccgcgacccgcguccacagccaguacaucaaggccaacuccaaguucaucggcaucacggagcuggggagcggcuccggggcccagacccgguacgcccccgugaacuggggccacggggagaucaacgacagcaccaccguggagccgauccuggacggccccuaccagcccacgaccuucacgcccccgaacgacuacuggauccucaucaacuccaacaccaacggcgucguguacgagagcaccaacaacuccgacuucuggaccgccguggucgcgaucgagccccacgugaaccccguggaccgccaguacaccaucuucggggagagcaagcaguucaacgucuccaacgacagcaacaaguggaaguuccuggagauguuccgguccagcucccagaacgaguucuacaaccgccggacccugacgagcgacacccgcuucgugggcauccucaaguacgggggccggguguggaccuuccacggggagacgccccgcgccaccaccgacuccagcuccaccgccaaccugaacaacaucagcaucaccauccacuccgaguucuacaucaucccgcggagccaggagagcaagugcaacgaguacaucaacaacggccugugaggacuaguuauaagacugacuagcccgaugggccucccaacgggcccuccuccccuccuugcaccgagauuaaucaaaggcucuuuucagagccaccaaaaaaaaaaaaaaaaaaaaaaaaaaaaaaaaaaaaaaaaaaaaaaaaaaaaaaaaaaaaaaaaaaaaaaaaaaaaaaaaaaaaaaaaaaaaaaaaaaaaa

SEQ ID NO: 1593 - RNA, 879 nt, Artificial Sequence
  mRNA product Design i-3 (hSL-A100) comprising derived and/or modified sequence from RVA/Wa/P[8]__AAA66953.1__SP-IgE_P2_VP8*(41-223) (opt1)
aggagaaagcuuaccauggacuggaccuggauccuguuccucguggccgccgcgacccgcguccacagccaguacaucaaggccaacuccaaguucaucggcaucacggagcuggggagcggcuccggggcccagacccgguacgcccccgugaacuggggccacggggagaucaacgacagcaccaccguggagccgaugcuggacggccccuaccagcccacgaccuucacgcccccgaacgacuacuggauccucaucaacuccaacaccaacggcgucguguacgagagcaccaacaacuccgacuucuggaccgccguggucgcgaucgagccccacgugaaccccguggaccgccaguacaccaucuucggggagagcaagcaguucaacgucuccaacgacagcaacaaguggaaguuccuggagauguuccgguccagcucccagaacgaguucuacaaccgccggacccugacgagcgacacccgcuucgugggcauccucaaguacgggggccggguguggaccuuccacggggagacgccccgcgccaccaccgacuccagcuccaccgccaaccugaacaacaucagcaucaccauccacuccgaguucuacaucaucccgcggagccaggagagcaagugcaacgaguacaucaacaacggccugugaggacuaguuauaagacugacuagcccgaugggccucccaacgggcccuccuccccuccuugcaccgagauuaaucaaaggcucuuuucagagccaccaaaaaaaaaaaaaaaaaaaaaaaaaaaaaaaaaaaaaaaaaaaaaaaaaaaaaaaaaaaaaaaaaaaaaaaaaaaaaaaaaaaaaaaaaaaaaaaaaaaaa

SEQ ID NO: 1594 - RNA, 756 nt, Artificial Sequence
  mRNA product Design i-3 (hSL-A100) comprising derived and/or modified sequence from RVA/BE1058/P[4]__AEX30665.1__P2_VP8*(65-223) (opt4)
aggagaaagcuuaccaugcaguacaucaaggccaacagcaaguucaucggcaucaccgagcugggcagcggcagcggccuggacggccccuaccagcccaccaccuucaagccccccaacgacuacuggcugcugaucagcagcaacaccgacggcgugguguacgagagcaccaacaacagcgacuucuggaccgccgugaucgccguggagccccacgugaaccagaccaacagacaguacgugcuguucggcgagaacaagcaguucaacaucgagaacagcagcgacaaguggaaguucuucgagauguucaagggcaacagccagagcgacuucagcaacagaagaacccugaccagcagcaacagacuggugggcaugcugaaguacggcggcagaguguggaccuuccacggcgagacccccagagccaccaccgacagcagcagcaccgccgaccugaacaacaucagcaucaucauccacagcgaguucuacaucauccccagaagccaggagagcaagugcaacgaguacaucaacaacggccugugaggacuaguuauaagacugacuagcccgaugggccucccaacgggcccuccuccccuccuugcaccgagauuaaucaaaggcucuuuucagagccaccaaaaaaaaaaaaaaaaaaaaaaaaaaaaaaaaaaaaaaaaaaaaaaaaaaaaaaaaaaaaaaaaaaaaaaaaaaaaaaaaaaaaaaaaaaaaaaaaaaaaa

SEQ ID NO: 1595 - RNA, 756 nt, Artificial Sequence
  mRNA product Design i-3 (hSL-A100) comprising derived and/or modified sequence from RVA/DS-1/P[4]__CAD62680.1__P2_VP8*(65-223) (opt4)
aggagaaagcuuaccaugcaguacaucaaggccaacagcaaguucaucggcaucaccgagcugggcagcggcagcggccuggacggccccuaccagcccaccaccuucaagccccccaacgacuacuggcugcugaucagcagcaacaccaacggcgugguguacgagagcaccaacaacaacgacuucuggaccgccgugagcagcguggagccccacgugagccagaccaacagacaguacauccuguucggcgagaacaagcaguucaacguggagaacaacagcgacaaguggaaguucuucgagaccuucaccggcagcagccagggcaacuucagcaacagaagaacccugaccagcagcaacagacuggugggcaugcugaaguacggcggcagaguguggaccuuccacggcgagacccccagagccaccaccgacagcagcaacaccgccgaccugaacaacaucagcaucaucauccacagcgaguucuacaucauccccagaagccaggagagcaagugcaacgaguacaucaacaacggccugugaggacuaguuauaagacugacuagcccgaugggccucccaacgggcccuccuccccuccuugcaccgagauuaaucaaaggcucuuuucagagccaccaaaaaaaaaaaaaaaaaaaaaaaaaaaaaaaaaaaaaaaaaaaaaaaaaaaaaaaaaaaaaaaaaaaaaaaaaaaaaaaaaaaaaaaaaaaaaaaaaaaaa

SEQ ID NO: 1596 - RNA, 756 nt, Artificial Sequence; identical to SEQ ID NO: 1595
  mRNA product Design i-3 (hSL-A100) comprising derived and/or modified sequence from RVA/DS-1/P[4]__ABV53252.1__P2_VP8*(65-223) (opt4)

SEQ ID NO: 1597 - RNA, 756 nt, Artificial Sequence
  mRNA product Design i-3 (hSL-A100) comprising derived and/or modified sequence from RVA/F01322/P[6]__AFA51886.1__P2_VP8*(65-223) (opt4)
aggagaaagcuuaccaugcaguacaucaaggccaacagcaaguucaucggcaucaccgagcugggcagcggcagcggccuggacggccccuaccagcccaccaacuucaagccccccaacgacuacuggauccugcugaaccccaccaaccagcagguggugcuggagggcaccaacaagaccgacaucuggguggcccugcugcugguggagcccaacgugaccaaccagagcagacaguacacccuguucggcgagaccaagcagaucaccguggagaacaacaccaacaaguggaaguucuucgagauguucagaagcagcgugagcgccgaguuccagcacaagagaacccugaccagcgacaccaagcuggccggcuucaugaaguucuacaacagcguguggaccuuccacggcgagacccccaacgccaccaccgacuacagcagcaccagcaaccuguucgagguggagaccgugauccacguggaguucuacaucauccccagaagccaggagagcaagugcagcgaguacaucaacaccggccugugaggacuaguuauaagacugacuagcccgaugggccucccaacgggcccuccuccccuccuugcaccgagauuaaucaaaggcucuuuucagagccaccaaaaaaaaaaaaaaaaaaaaaaaaaaaaaaaaaaaaaaaaaaaaaaaaaaaaaaaaaaaaaaaaaaaaaaaaaaaaaaaaaaaaaaaaaaaaaaaaaaaaa

SEQ ID NO: 1598 - RNA, 756 nt, Artificial Sequence
  mRNA product Design i-3 (hSL-A100) comprising derived and/or modified sequence from RVA/1076/P[6]__AAA47337.1__P2_VP8*(65-223) (opt4)
aggagaaagcuuaccaugcaguacaucaaggccaacagcaaguucaucggcaucaccgagcugggcagcggcagcggccuggacggccccuaccagcccaccagcuucaagccccccagcgacuacuggauccugcugaaccccaccaaccagcagguggugcuggagggcaccaacaagaccgacaucuggguggcccugcugcugguggagcccaacgugaccaaccagagcagacaguacacccuguucggcgagaccaagcagaucaccguggagaacaacaccaacaaguggaaguucuucgagauguucagaagcagcgugagcgccgaguuccagcacaagagaacccugaccagcgacaccaagcuggccggcuuccugaaguucuacaacagcguguggaccuucuacggcgagaccccccacgccaccaccgacuacagcagcaccagcaaccugagcgagguggagaccgccauccacguggaguucuacaucauccccagaagccaggagagcaagugcaacgaguacaucaacaccggccugugaggacuaguuauaagacugacuagcccgaugggccucccaacgggcccuccuccccuccuugcaccgagauuaaucaaaggcucuuuucagagccaccaaaaaaaaaaaaaaaaaaaaaaaaaaaaaaaaaaaaaaaaaaaaaaaaaaaaaaaaaaaaaaaaaaaaaaaaaaaaaaaaaaaaaaaaaaaaaaaaaaaaa

SEQ ID NO: 1599 - RNA, 756 nt, Artificial Sequence
  mRNA product Design i-3 (hSL-A100) comprising derived and/or modified sequence from RVA/BE1128/P[8]__AEX30671.1__P2_VP8*(65-223) (opt4)
aggagaaagcuuaccaugcaguacaucaaggccaacagcaaguucaucggcaucaccgagcugggcagcggcagcggccuggacggccccuaccagcccaccaccuucaccccccccaccgacuacuggauccugaucaccagcaacaccaacggcgugguguacgagagcaccaacaacagcgacuucuggaccgccgugaucgccguggagccccacgugaaccccguggacagacaguacaacguguucggcgagaacaagcaguucaacgugagaaacgacagcgacaaguggaaguuccuggagauguucagaggcagcagccagaacgacuucuacaacagaagaacccugaccagcgacaccagacuggugggcauccugaaguacggcggcagaguguggaccuuccacggcgagacccccagagccaccaccgacagcagcaacaccgccaaccuggacggcaucagcaucaccauccacagcgaguucuacaucauccccagaagccaggagagcaagugcaacgaguacaucaacaacggccugugaggacuaguuauaagacugacuagcccgaugggccucccaacgggcccuccuccccuccuugcaccgagauuaaucaaaggcucuuuucagagccaccaaaaaaaaaaaaaaaaaaaaaaaaaaaaaaaaaaaaaaaaaaaaaaaaaaaaaaaaaaaaaaaaaaaaaaaaaaaaaaaaaaaaaaaaaaaaaaaaaaaaa

SEQ ID NO: 1600 - RNA, 756 nt, Artificial Sequence
  mRNA product Design i-3 (hSL-A100) comprising derived and/or modified sequence from RVA/Wa-VirWa/P[8]__ACR22783.1__P2_VP8*(65-223) (opt4)
aggagaaagcuuaccaugcaguacaucaaggccaacagcaaguucaucggcaucaccgagcugggcagcggcagcggccuggacggccccuaccagcccaccaccuucaccccccccaacgacuacuggauccugaucaacagcaacaccaacggcgugguguacgagagcaccaacaacagcgacuucuggaccgccgugguggccaucgagccccacgugaaccccguggacagacaguacaccaucuucggcgagagcaagcaguucaacgugagaaacgacagcaacaaguggaaguuccuggagauguucagaagcagcagccagaacgaguucuacaacagaagaacccugaccagcgacaccagacuggugggcauccugaaguacggcggcagaguguggaccuuccacggcgagacccccagagccaccaccgacagcagcagcaccgccaaccugaacaacaucagcaucaccauccacagcgaguucuacaucauccccagaagccaggagagcaagugcaacgaguacaucaacaacggccugugaggacuaguuauaagacugacuagcccgaugggccucccaacgggcccuccuccccuccuugcaccgagauuaaucaaaggcucuuuucagagccaccaaaaaaaaaaaaaaaaaaaaaaaaaaaaaaaaaaaaaaaaaaaaaaaaaaaaaaaaaaaaaaaaaaaaaaaaaaaaaaaaaaaaaaaaaaaaaaaaaaaaa

SEQ ID NO: 1601 - RNA, 756 nt, Artificial Sequence
  mRNA product Design i-3 (hSL-A100) comprising derived and/or modified sequence from RVA/Wa/P[8]__AAA47290.1__P2_VP8*(65-223) (opt4)
aggagaaagcuuaccaugcaguacaucaaggccaacagcaaguucaucggcaucaccgagcugggcagcggcagcggccuggacggccccuaccagcccaccaccuucaccccccccaacgacuacuggauccugaucaacagcaacaccaacggcgugguguacgagagcaccaacaacagcgacuucuggaccgccgugguggccaucgagccccacgugaaccccguggacagacaguacaccaucuucggcgagagcaagcaguucaacgugagcaacgacagcaacaaguggaaguuccuggagauguucagaagcagcagccagaacgaguucuacaacagaagaacccugaccagcgacaccagauucgugggcauccugaaguacggcggcagaguguggaccuuccacggcgagacccccagagccaccaccgacagcagcagcaccgccaaccugaacaacaucagcaucaccauccacagcgaguucuacaucauccccagaagccaggagagcaagugcaacgaguacaucaacaacggccugugaggacuaguuauaagacugacuagcccgaugggccucccaacgggcccuccuccccuccuugcaccgagauuaaucaaaggcucuuuucagagccaccaaaaaaaaaaaaaaaaaaaaaaaaaaaaaaaaaaaaaaaaaaaaaaaaaaaaaaaaaaaaaaaaaaaaaaaaaaaaaaaaaaaaaaaaaaaaaaaaaaaaa

SEQ ID NO: 1602 - RNA, 756 nt, Artificial Sequence; identical to SEQ ID NO: 1601
  mRNA product Design i-3 (hSL-A100) comprising derived and/or modified sequence from RVA/Wa/P[8]__AAA66953.1__P2_VP8*(65-223) (opt4)

SEQ ID NO: 1603 - RNA, 828 nt, Artificial Sequence
  mRNA product Design i-3 (hSL-A100) comprising derived and/or modified sequence from RVA/BE1058/P[4]__AEX30665.1__P2_VP8*(41-223) (opt4)
aggagaaagcuuaccaugcaguacaucaaggccaacagcaaguucaucggcaucaccgagcugggcagcggcagcggcgcccagaccagauacgcccccgugaacuggggccacggcgagaucaacgacagcaccaccguggagcccgugcuggacggccccuaccagcccaccaccuucaagccccccaacgacuacuggcugcugaucagcagcaacaccgacggcgugguguacgagagcaccaacaacagcgacuucuggaccgccgugaucgccguggagccccacgugaaccagaccaacagacaguacgugcuguucggcgagaacaagcaguucaacaucgagaacagcagcgacaaguggaaguucuucgagauguucaagggcaacagccagagcgacuucagcaacagaagaacccugaccagcagcaacagacuggugggcaugcugaaguacggcggcagaguguggaccuuccacggcgagacccccagagccaccaccgacagcagcagcaccgccgaccugaacaacaucagcaucaucauccacagcgaguucuacaucauccccagaagccaggagagcaagugcaacgaguacaucaacaacggccugugaggacuaguuauaagacugacuagcccgaugggccucccaacgggcccuccuccccuccuugcaccgagauuaaucaaaggcucuuuucagagccaccaaaaaaaaaaaaaaaaaaaaaaaaaaaaaaaaaaaaaaaaaaaaaaaaaaaaaaaaaaaaaaaaaaaaaaaaaaaaaaaaaaaaaaaaaaaaaaaaaaaaa

SEQ ID NO: 1604 - RNA, 828 nt, Artificial Sequence
  mRNA product Design i-3 (hSL-A100) comprising derived and/or modified sequence from RVA/DS-1/P[4]__CAD62680.1__P2_VP8*(41-223) (opt4)
aggagaaagcuuaccaugcaguacaucaaggccaacagcaaguucaucggcaucaccgagcugggcagcggcagcggcgcccagaccagauacgcccccgugaacuggggcagcugggagaucaacgacagcaccaccguggagcccgugcuggacggccccuaccagcccaccaccuucaagccccccaacgacuacuggcugcugaucagcagcaacaccaacggcgugguguacgagagcaccaacaacaacgacuucuggaccgccgugagcagcguggagccccacgugagccagaccaacagacaguacauccuguucggcgagaacaagcaguucaacguggagaacaacagcgacaaguggaaguucuucgagaccuucaccggcagcagccagggcaacuucagcaacagaagaacccugaccagcagcaacagacuggugggcaugcugaaguacggcggcagaguguggaccuuccacggcgagacccccagagccaccaccgacagcagcaacaccgccgaccugaacaacaucagcaucaucauccacagcgaguucuacaucauccccagaagccaggagagcaagugcaacgaguacaucaacaacggccugugaggacuaguuauaagacugacuagcccgaugggccucccaacgggcccuccuccccuccuugcaccgagauuaaucaaaggcucuuuucagagccaccaaaaaaaaaaaaaaaaaaaaaaaaaaaaaaaaaaaaaaaaaaaaaaaaaaaaaaaaaaaaaaaaaaaaaaaaaaaaaaaaaaaaaaaaaaaaaaaaaaaaa

SEQ ID NO: 1605 - RNA, 828 nt, Artificial Sequence; identical to SEQ ID NO: 1604
  mRNA product Design i-3 (hSL-A100) comprising derived and/or modified sequence from RVA/DS-1/P[4]__ABV53252.1__P2_VP8*(41-223) (opt4)

SEQ ID NO: 1606 - RNA, 828 nt, Artificial Sequence
  mRNA product Design i-3 (hSL-A100) comprising derived and/or modified sequence from RVA/F01322/P[6]__AFA51886.1__P2_VP8*(41-223) (opt4)
aggagaaagcuuaccaugcaguacaucaaggccaacagcaaguucaucggcaucaccgagcugggcagcggcagcggcgcccagaccaacuacgcccccgugaccuggagccacggcgaggugaacgacagcaccaccaucgagcccgugcuggacggccccuaccagcccaccaacuucaagccccccaacgacuacuggauccugcugaaccccaccaaccagcagguggugcuggagggcaccaacaagaccgacaucuggguggcccugcugcugguggagcccaacgugaccaaccagagcagacaguacacccuguucggcgagaccaagcagaucaccguggagaacaacaccaacaaguggaaguucuucgagauguucagaagcagcgugagcgccgaguuccagcacaagagaacccugaccagcgacaccaagcuggccggcuucaugaaguucuacaacagcguguggaccuuccacggcgagacccccaacgccaccaccgacuacagcagcaccagcaaccuguucgagguggagaccgugauccacguggaguucuacaucauccccagaagccaggagagcaagugcagcgaguacaucaacaccggccugugaggacuaguuauaagacugacuagcccgaugggccucccaacgggcccuccuccccuccuugcaccgagauuaaucaaaggcucuuuucagagccaccaaaaaaaaaaaaaaaaaaaaaaaaaaaaaaaaaaaaaaaaaaaaaaaaaaaaaaaaaaaaaaaaaaaaaaaaaaaaaaaaaaaaaaaaaaaaaaaaaaaaa

SEQ ID NO: 1607 - RNA, 828 nt, Artificial Sequence
  mRNA product Design i-3 (hSL-A100) comprising derived and/or modified sequence from RVA/1076/P[6]__AAA47337.1__P2_VP8*(41-223) (opt4)
aggagaaagcuuaccaugcaguacaucaaggccaacagcaaguucaucggcaucaccgagcugggcagcggcagcggcgcccagaccaacuacgcccccgugaccuggagccacggcgaggugaacgacagcaccaccaucgagcccgugcuggacggccccuaccagcccaccagcuucaagccccccagcgacuacuggauccugcugaaccccaccaaccagcagguggugcuggagggcaccaacaagaccgacaucuggguggcccugcugcugguggagcccaacgugaccaaccagagcagacaguacacccuguucggcgagaccaagcagaucaccguggagaacaacaccaacaaguggaaguucuucgagauguucagaagcagcgugagcgccgaguuccagcacaagagaacccugaccagcgacaccaagcuggccggcuuccugaaguucuacaacagcguguggaccuucuacggcgagaccccccacgccaccaccgacuacagcagcaccagcaaccugagcgagguggagaccgccauccacguggaguucuacaucauccccagaagccaggagagcaagugcaacgaguacaucaacaccggccugugaggacuaguuauaagacugacuagcccgaugggccucccaacgggcccuccuccccuccuugcaccgagauuaaucaaaggcucuuuucagagccaccaaaaaaaaaaaaaaaaaaaaaaaaaaaaaaaaaaaaaaaaaaaaaaaaaaaaaaaaaaaaaaaaaaaaaaaaaaaaaaaaaaaaaaaaaaaaaaaaaaaaa

SEQ ID NO: 1608 - RNA, 828 nt, Artificial Sequence
  mRNA product Design i-3 (hSL-A100) comprising derived and/or modified sequence from RVA/BE1128/P[8]__AEX30671.1__P2_VP8*(41-223) (opt4)
aggagaaagcuuaccaugcaguacaucaaggccaacagcaaguucaucggcaucaccgagcugggcagcggcagcggcgcccagaccagauacgcccccgugaacuggggccacggcgagaucaacgacagcaccaccguggagcccauccuggacggccccuaccagcccaccaccuucaccccccccaccgacuacuggauccugaucaccagcaacaccaacggcgugguguacgagagcaccaacaacagcgacuucuggaccgccgugaucgccguggagccccacgugaaccccguggacagacaguacaacguguucggcgagaacaagcaguucaacgugagaaacgacagcgacaaguggaaguuccuggagauguucagaggcagcagccagaacgacuucuacaacagaagaacccugaccagcgacaccagacuggugggcauccugaaguacggcggcagaguguggaccuuccacggcgagacccccagagccaccaccgacagcagcaacaccgccaaccuggacggcaucagcaucaccauccacagcgaguucuacaucauccccagaagccaggagagcaagugcaacgaguacaucaacaacggccugugaggacuaguuauaagacugacuagcccgaugggccucccaacgggcccuccuccccuccuugcaccgagauuaaucaaaggcucuuuucagagccaccaaaaaaaaaaaaaaaaaaaaaaaaaaaaaaaaaaaaaaaaaaaaaaaaaaaaaaaaaaaaaaaaaaaaaaaaaaaaaaaaaaaaaaaaaaaaaaaaaaaaa

SEQ ID NO: 1609 - RNA, 828 nt, Artificial Sequence
  mRNA product Design i-3 (hSL-A100) comprising derived and/or modified sequence from RVA/Wa-VirWa/P[8]__ACR22783.1__P2_VP8*(41-223) (opt4)
aggagaaagcuuaccaugcaguacaucaaggccaacagcaaguucaucggcaucaccgagcugggcagcggcagcggcgcccagaccagauacgcccccgugaacuggggccacggcgagaucaacgacagcaccaccguggagcccauccuggacggccccuaccagcccaccaccuucaccccccccaacgacuacuggauccugaucaacagcaacaccaacggcgugguguacgagagcaccaacaacagcgacuucuggaccgccgugguggccaucgagccccacgugaaccccguggacagacaguacaccaucuucggcgagagcaagcaguucaacgugagaaacgacagcaacaaguggaaguuccuggagauguucagaagcagcagccagaacgaguucuacaacagaagaacccugaccagcgacaccagacuggugggcauccugaaguacggcggcagaguguggaccuuccacggcgagacccccagagccaccaccgacagcagcagcaccgccaaccugaacaacaucagcaucaccauccacagcgaguucuacaucauccccagaagccaggagagcaagugcaacgaguacaucaacaacggccugugaggacuaguuauaagacugacuagcccgaugggccucccaacgggcccuccuccccuccuugcaccgagauuaaucaaaggcucuuuucagagccaccaaaaaaaaaaaaaaaaaaaaaaaaaaaaaaaaaaaaaaaaaaaaaaaaaaaaaaaaaaaaaaaaaaaaaaaaaaaaaaaaaaaaaaaaaaaaaaaaaaaaa

SEQ ID NO: 1610 - RNA, 828 nt, Artificial Sequence
  mRNA product Design i-3 (hSL-A100) comprising derived and/or modified sequence from RVA/Wa/P[8]__AAA47290.1__P2_VP8*(41-223) (opt4)
aggagaaagcuuaccaugcaguacaucaaggccaacagcaaguucaucggcaucaccgagcugggcagcggcagcggcgcccagaccagauacgcccccgugaacuggggccacggcgagaucaacgacagcaccaccguggagcccauccuggacggccccuaccagcccaccaccuucaccccccccaacgacuacuggauccugaucaacagcaacaccaacggcgugguguacgagagcaccaacaacagcgacuucuggaccgccgugguggccaucgagccccacgugaaccccguggacagacaguacaccaucuucggcgagagcaagcaguucaacgugagcaacgacagcaacaaguggaaguuccuggagauguucagaagcagcagccagaacgaguucuacaacagaagaacccugaccagcgacaccagauucgugggcauccugaaguacggcggcagaguguggaccuuccacggcgagacccccagagccaccaccgacagcagcagcaccgccaaccugaacaacaucagcaucaccauccacagcgaguucuacaucauccccagaagccaggagagcaagugcaacgaguacaucaacaacggccugugaggacuaguuauaagacugacuagcccgaugggccucccaacgggcccuccuccccuccuugcaccgagauuaaucaaaggcucuuuucagagccaccaaaaaaaaaaaaaaaaaaaaaaaaaaaaaaaaaaaaaaaaaaaaaaaaaaaaaaaaaaaaaaaaaaaaaaaaaaaaaaaaaaaaaaaaaaaaaaaaaaaaa

SEQ ID NO: 1611 - RNA, 828 nt, Artificial Sequence
  mRNA product Design i-3 (hSL-A100) comprising derived and/or modified sequence from RVA/Wa/P[8]__AAA66953.1__P2_VP8*(41-223) (opt4)
aggagaaagcuuaccaugcaguacaucaaggccaacagcaaguucaucggcaucaccgagcugggcagcggcagcggcgcccagaccagauacgcccccgugaacuggggccacggcgagaucaacgacagcaccaccguggagcccaugcuggacggccccuaccagcccaccaccuucaccccccccaacgacuacuggauccugaucaacagcaacaccaacggcgugguguacgagagcaccaacaacagcgacuucuggaccgccgugguggccaucgagccccacgugaaccccguggacagacaguacaccaucuucggcgagagcaagcaguucaacgugagcaacgacagcaacaaguggaaguuccuggagauguucagaagcagcagccagaacgaguucuacaacagaagaacccugaccagcgacaccagauucgugggcauccugaaguacggcggcagaguguggaccuuccacggcgagacccccagagccaccaccgacagcagcagcaccgccaaccugaacaacaucagcaucaccauccacagcgaguucuacaucauccccagaagccaggagagcaagugcaacgaguacaucaacaacggccugugaggacuaguuauaagacugacuagcccgaugggccucccaacgggcccuccuccccuccuugcaccgagauuaaucaaaggcucuuuucagagccaccaaaaaaaaaaaaaaaaaaaaaaaaaaaaaaaaaaaaaaaaaaaaaaaaaaaaaaaaaaaaaaaaaaaaaaaaaaaaaaaaaaaaaaaaaaaaaaaaaaaaa

SEQ ID NO: 1612 - RNA, 1254 nt, Artificial Sequence
  mRNA product Design i-3 (hSL-A100) comprising derived and/or modified sequence from RVA/BE1058/P[4]__AEX30665.1__P2_VP8*(65-223)_Ferritin (opt4)
aggagaaagcuuaccaugcaguacaucaaggccaacagcaaguucaucggcaucaccgagcugggcagcggcagcggccuggacggccccuaccagcccaccaccuucaagccccccaacgacuacuggcugcugaucagcagcaacaccgacggcgugguguacgagagcaccaacaacagcgacuucuggaccgccgugaucgccguggagccccacgugaaccagaccaacagacaguacgugcuguucggcgagaacaagcaguucaacaucgagaacagcagcgacaaguggaaguucuucgagauguucaagggcaacagccagagcgacuucagcaacagaagaacccugaccagcagcaacagacuggugggcaugcugaaguacggcggcagaguguggaccuuccacggcgagacccccagagccaccaccgacagcagcagcaccgccgaccugaacaacaucagcaucaucauccacagcgaguucuacaucauccccagaagccaggagagcaagugcaacgaguacaucaacaacggccugagcggcggcgacaucaucaagcugcugaacgagcaggugaacaaggagaugcagagcagcaaccuguacaugagcaugagcagcuggugcuacacccacagccuggacggcgccggccuguuccuguucgaccacgccgccgaggaguacgagcacgccaagaagcugaucaucuuccugaacgagaacaacgugcccgugcagcugaccagcaucagcgcccccgagcacaaguucgagggccugacccagaucuuccagaaggccuacgagcacgagcagcacaucagcgagagcaucaacaacaucguggaccacgccaucaagagcaaggaccacgccaccuucaacuuccugcagugguacguggccgagcagcacgaggaggaggugcuguucaaggacauccuggacaagaucgagcugaucggcaacgagaaccacggccuguaccuggccgaccaguacgugaagggcaucgccaagagcagaaagagcugaggacuaguuauaagacugacuagcccgaugggccucccaacgggcccuccuccccuccuugcaccgagauuaaucaaaggcucuuuucagagccaccaaaaaaaaaaaaaaaaaaaaaaaaaaaaaaaaaaaaaaaaaaaaaaaaaaaaaaaaaaaaaaaaaaaaaaaaaaaaaaaaaaaaaaaaaaaaaaaaaaaaa

SEQ ID NO: 1613 - RNA, 1254 nt, Artificial Sequence
  mRNA product Design i-3 (hSL-A100) comprising derived and/or modified sequence from RVA/DS-1/P[4]__CAD62680.1__P2_VP8*(65-223)_Ferritin (opt4)
aggagaaagcuuaccaugcaguacaucaaggccaacagcaaguucaucggcaucaccgagcugggcagcggcagcggccuggacggccccuaccagcccaccaccuucaagccccccaacgacuacuggcugcugaucagcagcaacaccaacggcgugguguacgagagcaccaacaacaacgacuucuggaccgccgugagcagcguggagccccacgugagccagaccaacagacaguacauccuguucggcgagaacaagcaguucaacguggagaacaacagcgacaaguggaaguucuucgagaccuucaccggcagcagccagggcaacuucagcaacagaagaacccugaccagcagcaacagacuggugggcaugcugaaguacggcggcagaguguggaccuuccacggcgagacccccagagccaccaccgacagcagcaacaccgccgaccugaacaacaucagcaucaucauccacagcgaguucuacaucauccccagaagccaggagagcaagugcaacgaguacaucaacaacggccugagcggcggcgacaucaucaagcugcugaacgagcaggugaacaaggagaugcagagcagcaaccuguacaugagcaugagcagcuggugcuacacccacagccuggacggcgccggccuguuccuguucgaccacgccgccgaggaguacgagcacgccaagaagcugaucaucuuccugaacgagaacaacgugcccgugcagcugaccagcaucagcgcccccgagcacaaguucgagggccugacccagaucuuccagaaggccuacgagcacgagcagcacaucagcgagagcaucaacaacaucguggaccacgccaucaagagcaaggaccacgccaccuucaacuuccugcagugguacguggccgagcagcacgaggaggaggugcuguucaaggacauccuggacaagaucgagcugaucggcaacgagaaccacggccuguaccuggccgaccaguacgugaagggcaucgccaagagcagaaagagcugaggacuaguuauaagacugacuagcccgaugggccucccaacgggcccuccuccccuccuugcaccgagauuaaucaaaggcucuuuucagagccaccaaaaaaaaaaaaaaaaaaaaaaaaaaaaaaaaaaaaaaaaaaaaaaaaaaaaaaaaaaaaaaaaaaaaaaaaaaaaaaaaaaaaaaaaaaaaaaaaaaaaa

SEQ ID NO: 1614 - RNA, 1254 nt, Artificial Sequence; identical to SEQ ID NO: 1613
  mRNA product Design i-3 (hSL-A100) comprising derived and/or modified sequence from RVA/DS-1/P[4]__ABV53252.1__P2_VP8*(65-223)_Ferritin (opt4)

SEQ ID NO: 1615 - RNA, 1254 nt, Artificial Sequence
  mRNA product Design i-3 (hSL-A100) comprising derived and/or modified sequence from RVA/F01322/P[6]__AFA51886.1__P2_VP8*(65-223)_Ferritin (opt4)
aggagaaagcuuaccaugcaguacaucaaggccaacagcaaguucaucggcaucaccgagcugggcagcggcagcggccuggacggccccuaccagcccaccaacuucaagccccccaacgacuacuggauccugcugaaccccaccaaccagcagguggugcuggagggcaccaacaagaccgacaucuggguggcccugcugcugguggagcccaacgugaccaaccagagcagacaguacacccuguucggcgagaccaagcagaucaccguggagaacaacaccaacaaguggaaguucuucgagauguucagaagcagcgugagcgccgaguuccagcacaagagaacccugaccagcgacaccaagcuggccggcuucaugaaguucuacaacagcguguggaccuuccacggcgagacccccaacgccaccaccgacuacagcagcaccagcaaccuguucgagguggagaccgugauccacguggaguucuacaucauccccagaagccaggagagcaagugcagcgaguacaucaacaccggccugagcggcggcgacaucaucaagcugcugaacgagcaggugaacaaggagaugcagagcagcaaccuguacaugagcaugagcagcuggugcuacacccacagccuggacggcgccggccuguuccuguucgaccacgccgccgaggaguacgagcacgccaagaagcugaucaucuuccugaacgagaacaacgugcccgugcagcugaccagcaucagcgcccccgagcacaaguucgagggccugacccagaucuuccagaaggccuacgagcacgagcagcacaucagcgagagcaucaacaacaucguggaccacgccaucaagagcaaggaccacgccaccuucaacuuccugcagugguacguggccgagcagcacgaggaggaggugcuguucaaggacauccuggacaagaucgagcugaucggcaacgagaaccacggccuguaccuggccgaccaguacgugaagggcaucgccaagagcagaaagagcugaggacuaguuauaagacugacuagcccgaugggccucccaacgggcccuccuccccuccuugcaccgagauuaaucaaaggcucuuuucagagccaccaaaaaaaaaaaaaaaaaaaaaaaaaaaaaaaaaaaaaaaaaaaaaaaaaaaaaaaaaaaaaaaaaaaaaaaaaaaaaaaaaaaaaaaaaaaaaaaaaaaaa

SEQ ID NO: 1616 - RNA, 1254 nt, Artificial Sequence
  mRNA product Design i-3 (hSL-A100) comprising derived and/or modified sequence from RVA/1076/P[6]__AAA47337.1__P2_VP8*(65-223)_Ferritin (opt4)
aggagaaagcuuaccaugcaguacaucaaggccaacagcaaguucaucggcaucaccgagcugggcagcggcagcggccuggacggccccuaccagcccaccagcuucaagccccccagcgacuacuggauccugcugaaccccaccaaccagcagguggugcuggagggcaccaacaagaccgacaucuggguggcccugcugcugguggagcccaacgugaccaaccagagcagacaguacacccuguucggcgagaccaagcagaucaccguggagaacaacaccaacaaguggaaguucuucgagauguucagaagcagcgugagcgccgaguuccagcacaagagaacccugaccagcgacaccaagcuggccggcuuccugaaguucuacaacagcguguggaccuucuacggcgagaccccccacgccaccaccgacuacagcagcaccagcaaccugagcgagguggagaccgccauccacguggaguucuacaucauccccagaagccaggagagcaagugcaacgaguacaucaacaccggccugagcggcggcgacaucaucaagcugcugaacgagcaggugaacaaggagaugcagagcagcaaccuguacaugagcaugagcagcuggugcuacacccacagccuggacggcgccggccuguuccuguucgaccacgccgccgaggaguacgagcacgccaagaagcugaucaucuuccugaacgagaacaacgugcccgugcagcugaccagcaucagcgcccccgagcacaaguucgagggccugacccagaucuuccagaaggccuacgagcacgagcagcacaucagcgagagcaucaacaacaucguggaccacgccaucaagagcaaggaccacgccaccuucaacuuccugcagugguacguggccgagcagcacgaggaggaggugcuguucaaggacauccuggacaagaucgagcugaucggcaacgagaaccacggccuguaccuggccgaccaguacgugaagggcaucgccaagagcagaaagagcugaggacuaguuauaagacugacuagcccgaugggccucccaacgggcccuccuccccuccuugcaccgagauuaaucaaaggcucuuuucagagccaccaaaaaaaaaaaaaaaaaaaaaaaaaaaaaaaaaaaaaaaaaaaaaaaaaaaaaaaaaaaaaaaaaaaaaaaaaaaaaaaaaaaaaaaaaaaaaaaaaaaaa

SEQ ID NO: 1617 - RNA, 1254 nt, Artificial Sequence
  mRNA product Design i-3 (hSL-A100) comprising derived and/or modified sequence from RVA/BE1128/P[8]__AEX30671.1__P2_VP8*(65-223)_Ferritin (opt4)
aggagaaagcuuaccaugcaguacaucaaggccaacagcaaguucaucggcaucaccgagcugggcagcggcagcggccuggacggccccuaccagcccaccaccuucaccccccccaccgacuacuggauccugaucaccagcaacaccaacggcgugguguacgagagcaccaacaacagcgacuucuggaccgccgugaucgccguggagccccacgugaaccccguggacagacaguacaacguguucggcgagaacaagcaguucaacgugagaaacgacagcgacaaguggaaguuccuggagauguucagaggcagcagccagaacgacuucuacaacagaagaacccugaccagcgacaccagacuggugggcauccugaaguacggcggcagaguguggaccuuccacggcgagacccccagagccaccaccgacagcagcaacaccgccaaccuggacggcaucagcaucaccauccacagcgaguucuacaucauccccagaagccaggagagcaagugcaacgaguacaucaacaacggccugagcggcggcgacaucaucaagcugcugaacgagcaggugaacaaggagaugcagagcagcaaccuguacaugagcaugagcagcuggugcuacacccacagccuggacggcgccggccuguuccuguucgaccacgccgccgaggaguacgagcacgccaagaagcugaucaucuuccugaacgagaacaacgugcccgugcagcugaccagcaucagcgcccccgagcacaaguucgagggccugacccagaucuuccagaaggccuacgagcacgagcagcacaucagcgagagcaucaacaacaucguggaccacgccaucaagagcaaggaccacgccaccuucaacuuccugcagugguacguggccgagcagcacgaggaggaggugcuguucaaggacauccuggacaagaucgagcugaucggcaacgagaaccacggccuguaccuggccgaccaguacgugaagggcaucgccaagagcagaaagagcugaggacuaguuauaagacugacuagcccgaugggccucccaacgggcccuccuccccuccuugcaccgagauuaaucaaaggcucuuuucagagccaccaaaaaaaaaaaaaaaaaaaaaaaaaaaaaaaaaaaaaaaaaaaaaaaaaaaaaaaaaaaaaaaaaaaaaaaaaaaaaaaaaaaaaaaaaaaaaaaaaaaaa

SEQ ID NO: 1618 - RNA, 1254 nt, Artificial Sequence
  mRNA product Design i-3 (hSL-A100) comprising derived and/or modified sequence from RVA/Wa-VirWa/P[8]__ACR22783.1__P2_VP8*(65-223)_Ferritin (opt4)
aggagaaagcuuaccaugcaguacaucaaggccaacagcaaguucaucggcaucaccgagcugggcagcggcagcggccuggacggccccuaccagcccaccaccuucaccccccccaacgacuacuggauccugaucaacagcaacaccaacggcgugguguacgagagcaccaacaacagcgacuucuggaccgccgugguggccaucgagccccacgugaaccccguggacagacaguacaccaucuucggcgagagcaagcaguucaacgugagaaacgacagcaacaaguggaaguuccuggagauguucagaagcagcagccagaacgaguucuacaacagaagaacccugaccagcgacaccagacuggugggcauccugaaguacggcggcagaguguggaccuuccacggcgagacccccagagccaccaccgacagcagcagcaccgccaaccugaacaacaucagcaucaccauccacagcgaguucuacaucauccccagaagccaggagagcaagugcaacgaguacaucaacaacggccugagcggcggcgacaucaucaagcugcugaacgagcaggugaacaaggagaugcagagcagcaaccuguacaugagcaugagcagcuggugcuacacccacagccuggacggcgccggccuguuccuguucgaccacgccgccgaggaguacgagcacgccaagaagcugaucaucuuccugaacgagaacaacgugcccgugcagcugaccagcaucagcgcccccgagcacaaguucgagggccugacccagaucuuccagaaggccuacgagcacgagcagcacaucagcgagagcaucaacaacaucguggaccacgccaucaagagcaaggaccacgccaccuucaacuuccugcagugguacguggccgagcagcacgaggaggaggugcuguucaaggacauccuggacaagaucgagcugaucggcaacgagaaccacggccuguaccuggccgaccaguacgugaagggcaucgccaagagcagaaagagcugaggacuaguuauaagacugacuagcccgaugggccucccaacgggcccuccuccccuccuugcaccgagauuaaucaaaggcucuuuucagagccaccaaaaaaaaaaaaaaaaaaaaaaaaaaaaaaaaaaaaaaaaaaaaaaaaaaaaaaaaaaaaaaaaaaaaaaaaaaaaaaaaaaaaaaaaaaaaaaaaaaaaa

SEQ ID NO: 1619 - RNA, 1254 nt, Artificial Sequence
  mRNA product Design i-3 (hSL-A100) comprising derived and/or modified sequence from RVA/Wa/P[8]__AAA47290.1__P2_VP8*(65-223)_Ferritin (opt4)
aggagaaagcuuaccaugcaguacaucaaggccaacagcaaguucaucggcaucaccgagcugggcagcggcagcggccuggacggccccuaccagcccaccaccuucaccccccccaacgacuacuggauccugaucaacagcaacaccaacggcgugguguacgagagcaccaacaacagcgacuucuggaccgccgugguggccaucgagccccacgugaaccccguggacagacaguacaccaucuucggcgagagcaagcaguucaacgugagcaacgacagcaacaaguggaaguuccuggagauguucagaagcagcagccagaacgaguucuacaacagaagaacccugaccagcgacaccagauucgugggcauccugaaguacggcggcagaguguggaccuuccacggcgagacccccagagccaccaccgacagcagcagcaccgccaaccugaacaacaucagcaucaccauccacagcgaguucuacaucauccccagaagccaggagagcaagugcaacgaguacaucaacaacggccugagcggcggcgacaucaucaagcugcugaacgagcaggugaacaaggagaugcagagcagcaaccuguacaugagcaugagcagcuggugcuacacccacagccuggacggcgccggccuguuccuguucgaccacgccgccgaggaguacgagcacgccaagaagcugaucaucuuccugaacgagaacaacgugcccgugcagcugaccagcaucagcgcccccgagcacaaguucgagggccugacccagaucuuccagaaggccuacgagcacgagcagcacaucagcgagagcaucaacaacaucguggaccacgccaucaagagcaaggaccacgccaccuucaacuuccugcagugguacguggccgagcagcacgaggaggaggugcuguucaaggacauccuggacaagaucgagcugaucggcaacgagaaccacggccuguaccuggccgaccaguacgugaagggcaucgccaagagcagaaagagcugaggacuaguuauaagacugacuagcccgaugggccucccaacgggcccuccuccccuccuugcaccgagauuaaucaaaggcucuuuucagagccaccaaaaaaaaaaaaaaaaaaaaaaaaaaaaaaaaaaaaaaaaaaaaaaaaaaaaaaaaaaaaaaaaaaaaaaaaaaaaaaaaaaaaaaaaaaaaaaaaaaaaa

SEQ ID NO: 1620 - RNA, 1254 nt, Artificial Sequence; identical to SEQ ID NO: 1619
  mRNA product Design i-3 (hSL-A100) comprising derived and/or modified sequence from RVA/Wa/P[8]__AAA66953.1__P2_VP8*(65-223)_Ferritin (opt4)

SEQ ID NO: 1621 - RNA, 1326 nt, Artificial Sequence
  mRNA product Design i-3 (hSL-A100) comprising derived and/or modified sequence from RVA/BE1058/P[4]__AEX30665.1__P2_VP8*(41-223)_Ferritin (opt4)
aggagaaagcuuaccaugcaguacaucaaggccaacagcaaguucaucggcaucaccgagcugggcagcggcagcggcgcccagaccagauacgcccccgugaacuggggccacggcgagaucaacgacagcaccaccguggagcccgugcuggacggccccuaccagcccaccaccuucaagccccccaacgacuacuggcugcugaucagcagcaacaccgacggcgugguguacgagagcaccaacaacagcgacuucuggaccgccgugaucgccguggagccccacgugaaccagaccaacagacaguacgugcuguucggcgagaacaagcaguucaacaucgagaacagcagcgacaaguggaaguucuucgagauguucaagggcaacagccagagcgacuucagcaacagaagaacccugaccagcagcaacagacuggugggcaugcugaaguacggcggcagaguguggaccuuccacggcgagacccccagagccaccaccgacagcagcagcaccgccgaccugaacaacaucagcaucaucauccacagcgaguucuacaucauccccagaagccaggagagcaagugcaacgaguacaucaacaacggccugagcggcggcgacaucaucaagcugcugaacgagcaggugaacaaggagaugcagagcagcaaccuguacaugagcaugagcagcuggugcuacacccacagccuggacggcgccggccuguuccuguucgaccacgccgccgaggaguacgagcacgccaagaagcugaucaucuuccugaacgagaacaacgugcccgugcagcugaccagcaucagcgcccccgagcacaaguucgagggccugacccagaucuuccagaaggccuacgagcacgagcagcacaucagcgagagcaucaacaacaucguggaccacgccaucaagagcaaggaccacgccaccuucaacuuccugcagugguacguggccgagcagcacgaggaggaggugcuguucaaggacauccuggacaagaucgagcugaucggcaacgagaaccacggccuguaccuggccgaccaguacgugaagggcaucgccaagagcagaaagagcugaggacuaguuauaagacugacuagcccgaugggccucccaacgggcccuccuccccuccuugcaccgagauuaaucaaaggcucuuuucagagccaccaaaaaaaaaaaaaaaaaaaaaaaaaaaaaaaaaaaaaaaaaaaaaaaaaaaaaaaaaaaaaaaaaaaaaaaaaaaaaaaaaaaaaaaaaaaaaaaaaaaaa

SEQ ID NO: 1622 - RNA, 1326 nt, Artificial Sequence
  mRNA product Design i-3 (hSL-A100) comprising derived and/or modified sequence from RVA/DS-1/P[4]__CAD62680.1__P2_VP8*(41-223)_Ferritin (opt4)
aggagaaagcuuaccaugcaguacaucaaggccaacagcaaguucaucggcaucaccgagcugggcagcggcagcggcgcccagaccagauacgcccccgugaacuggggcagcugggagaucaacgacagcaccaccguggagcccgugcuggacggccccuaccagcccaccaccuucaagccccccaacgacuacuggcugcugaucagcagcaacaccaacggcgugguguacgagagcaccaacaacaacgacuucuggaccgccgugagcagcguggagccccacgugagccagaccaacagacaguacauccuguucggcgagaacaagcaguucaacguggagaacaacagcgacaaguggaaguucuucgagaccuucaccggcagcagccagggcaacuucagcaacagaagaacccugaccagcagcaacagacuggugggcaugcugaaguacggcggcagaguguggaccuuccacggcgagacccccagagccaccaccgacagcagcaacaccgccgaccugaacaacaucagcaucaucauccacagcgaguucuacaucauccccagaagccaggagagcaagugcaacgaguacaucaacaacggccugagcggcggcgacaucaucaagcugcugaacgagcaggugaacaaggagaugcagagcagcaaccuguacaugagcaugagcagcuggugcuacacccacagccuggacggcgccggccuguuccuguucgaccacgccgccgaggaguacgagcacgccaagaagcugaucaucuuccugaacgagaacaacgugcccgugcagcugaccagcaucagcgcccccgagcacaaguucgagggccugacccagaucuuccagaaggccuacgagcacgagcagcacaucagcgagagcaucaacaacaucguggaccacgccaucaagagcaaggaccacgccaccuucaacuuccugcagugguacguggccgagcagcacgaggaggaggugcuguucaaggacauccuggacaagaucgagcugaucggcaacgagaaccacggccuguaccuggccgaccaguacgugaagggcaucgccaagagcagaaagagcugaggacuaguuauaagacugacuagcccgaugggccucccaacgggcccuccuccccuccuugcaccgagauuaaucaaaggcucuuuucagagccaccaaaaaaaaaaaaaaaaaaaaaaaaaaaaaaaaaaaaaaaaaaaaaaaaaaaaaaaaaaaaaaaaaaaaaaaaaaaaaaaaaaaaaaaaaaaaaaaaaaaaa

SEQ ID NO: 1623 - RNA, 1326 nt, Artificial Sequence; identical to SEQ ID NO: 1622
  mRNA product Design i-3 (hSL-A100) comprising derived and/or modified sequence from RVA/DS-1/P[4]__ABV53252.1__P2_VP8*(41-223)_Ferritin (opt4)

SEQ ID NO: 1624 - RNA, 1326 nt, Artificial Sequence
  mRNA product Design i-3 (hSL-A100) comprising derived and/or modified sequence from RVA/F01322/P[6]__AFA51886.1__P2_VP8*(41-223)_Ferritin (opt4)
aggagaaagcuuaccaugcaguacaucaaggccaacagcaaguucaucggcaucaccgagcugggcagcggcagcggcgcccagaccaacuacgcccccgugaccuggagccacggcgaggugaacgacagcaccaccaucgagcccgugcuggacggccccuaccagcccaccaacuucaagccccccaacgacuacuggauccugcugaaccccaccaaccagcagguggugcuggagggcaccaacaagaccgacaucuggguggcccugcugcugguggagcccaacgugaccaaccagagcagacaguacacccuguucggcgagaccaagcagaucaccguggagaacaacaccaacaaguggaaguucuucgagauguucagaagcagcgugagcgccgaguuccagcacaagagaacccugaccagcgacaccaagcuggccggcuucaugaaguucuacaacagcguguggaccuuccacggcgagacccccaacgccaccaccgacuacagcagcaccagcaaccuguucgagguggagaccgugauccacguggaguucuacaucauccccagaagccaggagagcaagugcagcgaguacaucaacaccggccugagcggcggcgacaucaucaagcugcugaacgagcaggugaacaaggagaugcagagcagcaaccuguacaugagcaugagcagcuggugcuacacccacagccuggacggcgccggccuguuccuguucgaccacgccgccgaggaguacgagcacgccaagaagcugaucaucuuccugaacgagaacaacgugcccgugcagcugaccagcaucagcgcccccgagcacaaguucgagggccugacccagaucuuccagaaggccuacgagcacgagcagcacaucagcgagagcaucaacaacaucguggaccacgccaucaagagcaaggaccacgccaccuucaacuuccugcagugguacguggccgagcagcacgaggaggaggugcuguucaaggacauccuggacaagaucgagcugaucggcaacgagaaccacggccuguaccuggccgaccaguacgugaagggcaucgccaagagcagaaagagcugaggacuaguuauaagacugacuagcccgaugggccucccaacgggcccuccuccccuccuugcaccgagauuaaucaaaggcucuuuucagagccaccaaaaaaaaaaaaaaaaaaaaaaaaaaaaaaaaaaaaaaaaaaaaaaaaaaaaaaaaaaaaaaaaaaaaaaaaaaaaaaaaaaaaaaaaaaaaaaaaaaaaa

SEQ ID NO: 1625 - RNA, 1326 nt, Artificial Sequence
  mRNA product Design i-3 (hSL-A100) comprising derived and/or modified sequence from RVA/1076/P[6]__AAA47337.1__P2_VP8*(41-223)_Ferritin (opt4)
aggagaaagcuuaccaugcaguacaucaaggccaacagcaaguucaucggcaucaccgagcugggcagcggcagcggcgcccagaccaacuacgcccccgugaccuggagccacggcgaggugaacgacagcaccaccaucgagcccgugcuggacggccccuaccagcccaccagcuucaagccccccagcgacuacuggauccugcugaaccccaccaaccagcagguggugcuggagggcaccaacaagaccgacaucuggguggcccugcugcugguggagcccaacgugaccaaccagagcagacaguacacccuguucggcgagaccaagcagaucaccguggagaacaacaccaacaaguggaaguucuucgagauguucagaagcagcgugagcgccgaguuccagcacaagagaacccugaccagcgacaccaagcuggccggcuuccugaaguucuacaacagcguguggaccuucuacggcgagaccccccacgccaccaccgacuacagcagcaccagcaaccugagcgagguggagaccgccauccacguggaguucuacaucauccccagaagccaggagagcaagugcaacgaguacaucaacaccggccugagcggcggcgacaucaucaagcugcugaacgagcaggugaacaaggagaugcagagcagcaaccuguacaugagcaugagcagcuggugcuacacccacagccuggacggcgccggccuguuccuguucgaccacgccgccgaggaguacgagcacgccaagaagcugaucaucuuccugaacgagaacaacgugcccgugcagcugaccagcaucagcgcccccgagcacaaguucgagggccugacccagaucuuccagaaggccuacgagcacgagcagcacaucagcgagagcaucaacaacaucguggaccacgccaucaagagcaaggaccacgccaccuucaacuuccugcagugguacguggccgagcagcacgaggaggaggugcuguucaaggacauccuggacaagaucgagcugaucggcaacgagaaccacggccuguaccuggccgaccaguacgugaagggcaucgccaagagcagaaagagcugaggacuaguuauaagacugacuagcccgaugggccucccaacgggcccuccuccccuccuugcaccgagauuaaucaaaggcucuuuucagagccaccaaaaaaaaaaaaaaaaaaaaaaaaaaaaaaaaaaaaaaaaaaaaaaaaaaaaaaaaaaaaaaaaaaaaaaaaaaaaaaaaaaaaaaaaaaaaaaaaaaaaa

SEQ ID NO: 1626 - RNA, 1326 nt, Artificial Sequence
  mRNA product Design i-3 (hSL-A100) comprising derived and/or modified sequence from RVA/BE1128/P[8]__AEX30671.1__P2_VP8*(41-223)_Ferritin (opt4)
aggagaaagcuuaccaugcaguacaucaaggccaacagcaaguucaucggcaucaccgagcugggcagcggcagcggcgcccagaccagauacgcccccgugaacuggggccacggcgagaucaacgacagcaccaccguggagcccauccuggacggccccuaccagcccaccaccuucaccccccccaccgacuacuggauccugaucaccagcaacaccaacggcgugguguacgagagcaccaacaacagcgacuucuggaccgccgugaucgccguggagccccacgugaaccccguggacagacaguacaacguguucggcgagaacaagcaguucaacgugagaaacgacagcgacaaguggaaguuccuggagauguucagaggcagcagccagaacgacuucuacaacagaagaacccugaccagcgacaccagacuggugggcauccugaaguacggcggcagaguguggaccuuccacggcgagacccccagagccaccaccgacagcagcaacaccgccaaccuggacggcaucagcaucaccauccacagcgaguucuacaucauccccagaagccaggagagcaagugcaacgaguacaucaacaacggccugagcggcggcgacaucaucaagcugcugaacgagcaggugaacaaggagaugcagagcagcaaccuguacaugagcaugagcagcuggugcuacacccacagccuggacggcgccggccuguuccuguucgaccacgccgccgaggaguacgagcacgccaagaagcugaucaucuuccugaacgagaacaacgugcccgugcagcugaccagcaucagcgcccccgagcacaaguucgagggccugacccagaucuuccagaaggccuacgagcacgagcagcacaucagcgagagcaucaacaacaucguggaccacgccaucaagagcaaggaccacgccaccuucaacuuccugcagugguacguggccgagcagcacgaggaggaggugcuguucaaggacauccuggacaagaucgagcugaucggcaacgagaaccacggccuguaccuggccgaccaguacgugaagggcaucgccaagagcagaaagagcugaggacuaguuauaagacugacuagcccgaugggccucccaacgggcccuccuccccuccuugcaccgagauuaaucaaaggcucuuuucagagccaccaaaaaaaaaaaaaaaaaaaaaaaaaaaaaaaaaaaaaaaaaaaaaaaaaaaaaaaaaaaaaaaaaaaaaaaaaaaaaaaaaaaaaaaaaaaaaaaaaaaaa

SEQ ID NO: 1627 - RNA, 1326 nt, Artificial Sequence
  mRNA product Design i-3 (hSL-A100) comprising derived and/or modified sequence from RVA/Wa-VirWa/P[8]__ACR22783.1__P2_VP8*(41-223)_Ferritin (opt4)
aggagaaagcuuaccaugcaguacaucaaggccaacagcaaguucaucggcaucaccgagcugggcagcggcagcggcgcccagaccagauacgcccccgugaacuggggccacggcgagaucaacgacagcaccaccguggagcccauccuggacggccccuaccagcccaccaccuucaccccccccaacgacuacuggauccugaucaacagcaacaccaacggcgugguguacgagagcaccaacaacagcgacuucuggaccgccgugguggccaucgagccccacgugaaccccguggacagacaguacaccaucuucggcgagagcaagcaguucaacgugagaaacgacagcaacaaguggaaguuccuggagauguucagaagcagcagccagaacgaguucuacaacagaagaacccugaccagcgacaccagacuggugggcauccugaaguacggcggcagaguguggaccuuccacggcgagacccccagagccaccaccgacagcagcagcaccgccaaccugaacaacaucagcaucaccauccacagcgaguucuacaucauccccagaagccaggagagcaagugcaacgaguacaucaacaacggccugagcggcggcgacaucaucaagcugcugaacgagcaggugaacaaggagaugcagagcagcaaccuguacaugagcaugagcagcuggugcuacacccacagccuggacggcgccggccuguuccuguucgaccacgccgccgaggaguacgagcacgccaagaagcugaucaucuuccugaacgagaacaacgugcccgugcagcugaccagcaucagcgcccccgagcacaaguucgagggccugacccagaucuuccagaaggccuacgagcacgagcagcacaucagcgagagcaucaacaacaucguggaccacgccaucaagagcaaggaccacgccaccuucaacuuccugcagugguacguggccgagcagcacgaggaggaggugcuguucaaggacauccuggacaagaucgagcugaucggcaacgagaaccacggccuguaccuggccgaccaguacgugaagggcaucgccaagagcagaaagagcugaggacuaguuauaagacugacuagcccgaugggccucccaacgggcccuccuccccuccuugcaccgagauuaaucaaaggcucuuuucagagccaccaaaaaaaaaaaaaaaaaaaaaaaaaaaaaaaaaaaaaaaaaaaaaaaaaaaaaaaaaaaaaaaaaaaaaaaaaaaaaaaaaaaaaaaaaaaaaaaaaaaaa

SEQ ID NO: 1628 - RNA, 1326 nt, Artificial Sequence
  mRNA product Design i-3 (hSL-A100) comprising derived and/or modified sequence from RVA/Wa/P[8]__AAA47290.1__P2_VP8*(41-223)_Ferritin (opt4)
aggagaaagcuuaccaugcaguacaucaaggccaacagcaaguucaucggcaucaccgagcugggcagcggcagcggcgcccagaccagauacgcccccgugaacuggggccacggcgagaucaacgacagcaccaccguggagcccauccuggacggccccuaccagcccaccaccuucaccccccccaacgacuacuggauccugaucaacagcaacaccaacggcgugguguacgagagcaccaacaacagcgacuucuggaccgccgugguggccaucgagccccacgugaaccccguggacagacaguacaccaucuucggcgagagcaagcaguucaacgugagcaacgacagcaacaaguggaaguuccuggagauguucagaagcagcagccagaacgaguucuacaacagaagaacccugaccagcgacaccagauucgugggcauccugaaguacggcggcagaguguggaccuuccacggcgagacccccagagccaccaccgacagcagcagcaccgccaaccugaacaacaucagcaucaccauccacagcgaguucuacaucauccccagaagccaggagagcaagugcaacgaguacaucaacaacggccugagcggcggcgacaucaucaagcugcugaacgagcaggugaacaaggagaugcagagcagcaaccuguacaugagcaugagcagcuggugcuacacccacagccuggacggcgccggccuguuccuguucgaccacgccgccgaggaguacgagcacgccaagaagcugaucaucuuccugaacgagaacaacgugcccgugcagcugaccagcaucagcgcccccgagcacaaguucgagggccugacccagaucuuccagaaggccuacgagcacgagcagcacaucagcgagagcaucaacaacaucguggaccacgccaucaagagcaaggaccacgccaccuucaacuuccugcagugguacguggccgagcagcacgaggaggaggugcuguucaaggacauccuggacaagaucgagcugaucggcaacgagaaccacggccuguaccuggccgaccaguacgugaagggcaucgccaagagcagaaagagcugaggacuaguuauaagacugacuagcccgaugggccucccaacgggcccuccuccccuccuugcaccgagauuaaucaaaggcucuuuucagagccaccaaaaaaaaaaaaaaaaaaaaaaaaaaaaaaaaaaaaaaaaaaaaaaaaaaaaaaaaaaaaaaaaaaaaaaaaaaaaaaaaaaaaaaaaaaaaaaaaaaaaa

SEQ ID NO: 1629 - RNA, 1326 nt, Artificial Sequence
  mRNA product Design i-3 (hSL-A100) comprising derived and/or modified sequence from RVA/Wa/P[8]__AAA66953.1__P2_VP8*(41-223)_Ferritin (opt4)
aggagaaagcuuaccaugcaguacaucaaggccaacagcaaguucaucggcaucaccgagcugggcagcggcagcggcgcccagaccagauacgcccccgugaacuggggccacggcgagaucaacgacagcaccaccguggagcccaugcuggacggccccuaccagcccaccaccuucaccccccccaacgacuacuggauccugaucaacagcaacaccaacggcgugguguacgagagcaccaacaacagcgacuucuggaccgccgugguggccaucgagccccacgugaaccccguggacagacaguacaccaucuucggcgagagcaagcaguucaacgugagcaacgacagcaacaaguggaaguuccuggagauguucagaagcagcagccagaacgaguucuacaacagaagaacccugaccagcgacaccagauucgugggcauccugaaguacggcggcagaguguggaccuuccacggcgagacccccagagccaccaccgacagcagcagcaccgccaaccugaacaacaucagcaucaccauccacagcgaguucuacaucauccccagaagccaggagagcaagugcaacgaguacaucaacaacggccugagcggcggcgacaucaucaagcugcugaacgagcaggugaacaaggagaugcagagcagcaaccuguacaugagcaugagcagcuggugcuacacccacagccuggacggcgccggccuguuccuguucgaccacgccgccgaggaguacgagcacgccaagaagcugaucaucuuccugaacgagaacaacgugcccgugcagcugaccagcaucagcgcccccgagcacaaguucgagggccugacccagaucuuccagaaggccuacgagcacgagcagcacaucagcgagagcaucaacaacaucguggaccacgccaucaagagcaaggaccacgccaccuucaacuuccugcagugguacguggccgagcagcacgaggaggaggugcuguucaaggacauccuggacaagaucgagcugaucggcaacgagaaccacggccuguaccuggccgaccaguacgugaagggcaucgccaagagcagaaagagcugaggacuaguuauaagacugacuagcccgaugggccucccaacgggcccuccuccccuccuugcaccgagauuaaucaaaggcucuuuucagagccaccaaaaaaaaaaaaaaaaaaaaaaaaaaaaaaaaaaaaaaaaaaaaaaaaaaaaaaaaaaaaaaaaaaaaaaaaaaaaaaaaaaaaaaaaaaaaaaaaaaaaa

SEQ ID NO: 1630 - RNA, 1260 nt, Artificial Sequence
  mRNA product Design i-3 (hSL-A100) comprising derived and/or modified sequence from RVA/BE1058/P[4]__AEX30665.1__LumSynt_P2_VP8*(65-223) (opt4)
aggagaaagcuuaccaugcagaucuacgagggcaagcugaccgccgagggccugagauucggcaucguggccagcagauucaaccacgcccugguggacagacugguggagggcgccaucgacgccaucgugagacacggcggcagagaggaggacaucacccuggugagagugcccggcagcugggagauccccguggccgccggcgagcuggccagaaaggaggacaucgacgccgugaucgccaucggcgugcugaucagaggcgccaccccccacuucgacuacaucgccagcgaggugagcaagggccuggccgaccugagccuggagcugagaaagcccaucaccuucggcgugaucaccgccgacacccuggagcaggccaucgagagagccggcaccaagcacggcaacaagggcugggaggccgcccugagcgccaucgagauggccaaccuguucaagagccugagaggcggcagcggcggcagcggcggcagcggcggcagcggcggcggccaguacaucaaggccaacagcaaguucaucggcaucaccgagcugggcagcggcagcggccuggacggccccuaccagcccaccaccuucaagccccccaacgacuacuggcugcugaucagcagcaacaccgacggcgugguguacgagagcaccaacaacagcgacuucuggaccgccgugaucgccguggagccccacgugaaccagaccaacagacaguacgugcuguucggcgagaacaagcaguucaacaucgagaacagcagcgacaaguggaaguucuucgagauguucaagggcaacagccagagcgacuucagcaacagaagaacccugaccagcagcaacagacuggugggcaugcugaaguacggcggcagaguguggaccuuccacggcgagacccccagagccaccaccgacagcagcagcaccgccgaccugaacaacaucagcaucaucauccacagcgaguucuacaucauccccagaagccaggagagcaagugcaacgaguacaucaacaacggccugugaggacuaguuauaagacugacuagcccgaugggccucccaacgggcccuccuccccuccuugcaccgagauuaaucaaaggcucuuuucagagccaccaaaaaaaaaaaaaaaaaaaaaaaaaaaaaaaaaaaaaaaaaaaaaaaaaaaaaaaaaaaaaaaaaaaaaaaaaaaaaaaaaaaaaaaaaaaaaaaaaaaaa

SEQ ID NO: 1631 - RNA, 1260 nt, Artificial Sequence
  mRNA product Design i-3 (hSL-A100) comprising derived and/or modified sequence from RVA/DS-1/P[4]__CAD62680.1__LumSynt_P2_VP8*(65-223) (opt4)
aggagaaagcuuaccaugcagaucuacgagggcaagcugaccgccgagggccugagauucggcaucguggccagcagauucaaccacgcccugguggacagacugguggagggcgccaucgacgccaucgugagacacggcggcagagaggaggacaucacccuggugagagugcccggcagcugggagauccccguggccgccggcgagcuggccagaaaggaggacaucgacgccgugaucgccaucggcgugcugaucagaggcgccaccccccacuucgacuacaucgccagcgaggugagcaagggccuggccgaccugagccuggagcugagaaagcccaucaccuucggcgugaucaccgccgacacccuggagcaggccaucgagagagccggcaccaagcacggcaacaagggcugggaggccgcccugagcgccaucgagauggccaaccuguucaagagccugagaggcggcagcggcggcagcggcggcagcggcggcagcggcggcggccaguacaucaaggccaacagcaaguucaucggcaucaccgagcugggcagcggcagcggccuggacggccccuaccagcccaccaccuucaagccccccaacgacuacuggcugcugaucagcagcaacaccaacggcgugguguacgagagcaccaacaacaacgacuucuggaccgccgugagcagcguggagccccacgugagccagaccaacagacaguacauccuguucggcgagaacaagcaguucaacguggagaacaacagcgacaaguggaaguucuucgagaccuucaccggcagcagccagggcaacuucagcaacagaagaacccugaccagcagcaacagacuggugggcaugcugaaguacggcggcagaguguggaccuuccacggcgagacccccagagccaccaccgacagcagcaacaccgccgaccugaacaacaucagcaucaucauccacagcgaguucuacaucauccccagaagccaggagagcaagugcaacgaguacaucaacaacggccugugaggacuaguuauaagacugacuagcccgaugggccucccaacgggcccuccuccccuccuugcaccgagauuaaucaaaggcucuuuucagagccaccaaaaaaaaaaaaaaaaaaaaaaaaaaaaaaaaaaaaaaaaaaaaaaaaaaaaaaaaaaaaaaaaaaaaaaaaaaaaaaaaaaaaaaaaaaaaaaaaaaaaa

SEQ ID NO: 1632 - RNA, 1260 nt, Artificial Sequence; identical to SEQ ID NO: 1631
  mRNA product Design i-3 (hSL-A100) comprising derived and/or modified sequence from RVA/DS-1/P[4]__ABV53252.1__LumSynt_P2_VP8*(65-223) (opt4)

SEQ ID NO: 1633 - RNA, 1260 nt, Artificial Sequence
  mRNA product Design i-3 (hSL-A100) comprising derived and/or modified sequence from RVA/F01322/P[6]__AFA51886.1__LumSynt_P2_VP8*(65-223) (opt4)
aggagaaagcuuaccaugcagaucuacgagggcaagcugaccgccgagggccugagauucggcaucguggccagcagauucaaccacgcccugguggacagacugguggagggcgccaucgacgccaucgugagacacggcggcagagaggaggacaucacccuggugagagugcccggcagcugggagauccccguggccgccggcgagcuggccagaaaggaggacaucgacgccgugaucgccaucggcgugcugaucagaggcgccaccccccacuucgacuacaucgccagcgaggugagcaagggccuggccgaccugagccuggagcugagaaagcccaucaccuucggcgugaucaccgccgacacccuggagcaggccaucgagagagccggcaccaagcacggcaacaagggcugggaggccgcccugagcgccaucgagauggccaaccuguucaagagccugagaggcggcagcggcggcagcggcggcagcggcggcagcggcggcggccaguacaucaaggccaacagcaaguucaucggcaucaccgagcugggcagcggcagcggccuggacggccccuaccagcccaccaacuucaagccccccaacgacuacuggauccugcugaaccccaccaaccagcagguggugcuggagggcaccaacaagaccgacaucuggguggcccugcugcugguggagcccaacgugaccaaccagagcagacaguacacccuguucggcgagaccaagcagaucaccguggagaacaacaccaacaaguggaaguucuucgagauguucagaagcagcgugagcgccgaguuccagcacaagagaacccugaccagcgacaccaagcuggccggcuucaugaaguucuacaacagcguguggaccuuccacggcgagacccccaacgccaccaccgacuacagcagcaccagcaaccuguucgagguggagaccgugauccacguggaguucuacaucauccccagaagccaggagagcaagugcagcgaguacaucaacaccggccugugaggacuaguuauaagacugacuagcccgaugggccucccaacgggcccuccuccccuccuugcaccgagauuaaucaaaggcucuuuucagagccaccaaaaaaaaaaaaaaaaaaaaaaaaaaaaaaaaaaaaaaaaaaaaaaaaaaaaaaaaaaaaaaaaaaaaaaaaaaaaaaaaaaaaaaaaaaaaaaaaaaaaa

SEQ ID NO: 1634 - RNA, 1260 nt, Artificial Sequence
  mRNA product Design i-3 (hSL-A100) comprising derived and/or modified sequence from RVA/1076/P[6]__AAA47337.1__LumSynt_P2_VP8*(65-223) (opt4)
aggagaaagcuuaccaugcagaucuacgagggcaagcugaccgccgagggccugagauucggcaucguggccagcagauucaaccacgcccugguggacagacugguggagggcgccaucgacgccaucgugagacacggcggcagagaggaggacaucacccuggugagagugcccggcagcugggagauccccguggccgccggcgagcuggccagaaaggaggacaucgacgccgugaucgccaucggcgugcugaucagaggcgccaccccccacuucgacuacaucgccagcgaggugagcaagggccuggccgaccugagccuggagcugagaaagcccaucaccuucggcgugaucaccgccgacacccuggagcaggccaucgagagagccggcaccaagcacggcaacaagggcugggaggccgcccugagcgccaucgagauggccaaccuguucaagagccugagaggcggcagcggcggcagcggcggcagcggcggcagcggcggcggccaguacaucaaggccaacagcaaguucaucggcaucaccgagcugggcagcggcagcggccuggacggccccuaccagcccaccagcuucaagccccccagcgacuacuggauccugcugaaccccaccaaccagcagguggugcuggagggcaccaacaagaccgacaucuggguggcccugcugcugguggagcccaacgugaccaaccagagcagacaguacacccuguucggcgagaccaagcagaucaccguggagaacaacaccaacaaguggaaguucuucgagauguucagaagcagcgugagcgccgaguuccagcacaagagaacccugaccagcgacaccaagcuggccggcuuccugaaguucuacaacagcguguggaccuucuacggcgagaccccccacgccaccaccgacuacagcagcaccagcaaccugagcgagguggagaccgccauccacguggaguucuacaucauccccagaagccaggagagcaagugcaacgaguacaucaacaccggccugugaggacuaguuauaagacugacuagcccgaugggccucccaacgggcccuccuccccuccuugcaccgagauuaaucaaaggcucuuuucagagccaccaaaaaaaaaaaaaaaaaaaaaaaaaaaaaaaaaaaaaaaaaaaaaaaaaaaaaaaaaaaaaaaaaaaaaaaaaaaaaaaaaaaaaaaaaaaaaaaaaaaaa

SEQ ID NO: 1635 - RNA, 1260 nt, Artificial Sequence
  mRNA product Design i-3 (hSL-A100) comprising derived and/or modified sequence from RVA/BE1128/P[8]__AEX30671.1__LumSynt_P2_VP8*(65-223) (opt4)
aggagaaagcuuaccaugcagaucuacgagggcaagcugaccgccgagggccugagauucggcaucguggccagcagauucaaccacgcccugguggacagacugguggagggcgccaucgacgccaucgugagacacggcggcagagaggaggacaucacccuggugagagugcccggcagcugggagauccccguggccgccggcgagcuggccagaaaggaggacaucgacgccgugaucgccaucggcgugcugaucagaggcgccaccccccacuucgacuacaucgccagcgaggugagcaagggccuggccgaccugagccuggagcugagaaagcccaucaccuucggcgugaucaccgccgacacccuggagcaggccaucgagagagccggcaccaagcacggcaacaagggcugggaggccgcccugagcgccaucgagauggccaaccuguucaagagccugagaggcggcagcggcggcagcggcggcagcggcggcagcggcggcggccaguacaucaaggccaacagcaaguucaucggcaucaccgagcugggcagcggcagcggccuggacggccccuaccagcccaccaccuucaccccccccaccgacuacuggauccugaucaccagcaacaccaacggcgugguguacgagagcaccaacaacagcgacuucuggaccgccgugaucgccguggagccccacgugaaccccguggacagacaguacaacguguucggcgagaacaagcaguucaacgugagaaacgacagcgacaaguggaaguuccuggagauguucagaggcagcagccagaacgacuucuacaacagaagaacccugaccagcgacaccagacuggugggcauccugaaguacggcggcagaguguggaccuuccacggcgagacccccagagccaccaccgacagcagcaacaccgccaaccuggacggcaucagcaucaccauccacagcgaguucuacaucauccccagaagccaggagagcaagugcaacgaguacaucaacaacggccugugaggacuaguuauaagacugacuagcccgaugggccucccaacgggcccuccuccccuccuugcaccgagauuaaucaaaggcucuuuucagagccaccaaaaaaaaaaaaaaaaaaaaaaaaaaaaaaaaaaaaaaaaaaaaaaaaaaaaaaaaaaaaaaaaaaaaaaaaaaaaaaaaaaaaaaaaaaaaaaaaaaaaa

SEQ ID NO: 1636 - RNA, 1260 nt, Artificial Sequence
  mRNA product Design i-3 (hSL-A100) comprising derived and/or modified sequence from RVA/Wa-VirWa/P[8]__ACR22783.1__LumSynt_P2_VP8*(65-223) (opt4)
aggagaaagcuuaccaugcagaucuacgagggcaagcugaccgccgagggccugagauucggcaucguggccagcagauucaaccacgcccugguggacagacugguggagggcgccaucgacgccaucgugagacacggcggcagagaggaggacaucacccuggugagagugcccggcagcugggagauccccguggccgccggcgagcuggccagaaaggaggacaucgacgccgugaucgccaucggcgugcugaucagaggcgccaccccccacuucgacuacaucgccagcgaggugagcaagggccuggccgaccugagccuggagcugagaaagcccaucaccuucggcgugaucaccgccgacacccuggagcaggccaucgagagagccggcaccaagcacggcaacaagggcugggaggccgcccugagcgccaucgagauggccaaccuguucaagagccugagaggcggcagcggcggcagcggcggcagcggcggcagcggcggcggccaguacaucaaggccaacagcaaguucaucggcaucaccgagcugggcagcggcagcggccuggacggccccuaccagcccaccaccuucaccccccccaacgacuacuggauccugaucaacagcaacaccaacggcgugguguacgagagcaccaacaacagcgacuucuggaccgccgugguggccaucgagccccacgugaaccccguggacagacaguacaccaucuucggcgagagcaagcaguucaacgugagaaacgacagcaacaaguggaaguuccuggagauguucagaagcagcagccagaacgaguucuacaacagaagaacccugaccagcgacaccagacuggugggcauccugaaguacggcggcagaguguggaccuuccacggcgagacccccagagccaccaccgacagcagcagcaccgccaaccugaacaacaucagcaucaccauccacagcgaguucuacaucauccccagaagccaggagagcaagugcaacgaguacaucaacaacggccugugaggacuaguuauaagacugacuagcccgaugggccucccaacgggcccuccuccccuccuugcaccgagauuaaucaaaggcucuuuucagagccaccaaaaaaaaaaaaaaaaaaaaaaaaaaaaaaaaaaaaaaaaaaaaaaaaaaaaaaaaaaaaaaaaaaaaaaaaaaaaaaaaaaaaaaaaaaaaaaaaaaaaa

SEQ ID NO: 1637 - RNA, 1260 nt, Artificial Sequence
  mRNA product Design i-3 (hSL-A100) comprising derived and/or modified sequence from RVA/Wa/P[8]__AAA47290.1__LumSynt_P2_VP8*(65-223) (opt4)
aggagaaagcuuaccaugcagaucuacgagggcaagcugaccgccgagggccugagauucggcaucguggccagcagauucaaccacgcccugguggacagacugguggagggcgccaucgacgccaucgugagacacggcggcagagaggaggacaucacccuggugagagugcccggcagcugggagauccccguggccgccggcgagcuggccagaaaggaggacaucgacgccgugaucgccaucggcgugcugaucagaggcgccaccccccacuucgacuacaucgccagcgaggugagcaagggccuggccgaccugagccuggagcugagaaagcccaucaccuucggcgugaucaccgccgacacccuggagcaggccaucgagagagccggcaccaagcacggcaacaagggcugggaggccgcccugagcgccaucgagauggccaaccuguucaagagccugagaggcggcagcggcggcagcggcggcagcggcggcagcggcggcggccaguacaucaaggccaacagcaaguucaucggcaucaccgagcugggcagcggcagcggccuggacggccccuaccagcccaccaccuucaccccccccaacgacuacuggauccugaucaacagcaacaccaacggcgugguguacgagagcaccaacaacagcgacuucuggaccgccgugguggccaucgagccccacgugaaccccguggacagacaguacaccaucuucggcgagagcaagcaguucaacgugagcaacgacagcaacaaguggaaguuccuggagauguucagaagcagcagccagaacgaguucuacaacagaagaacccugaccagcgacaccagauucgugggcauccugaaguacggcggcagaguguggaccuuccacggcgagacccccagagccaccaccgacagcagcagcaccgccaaccugaacaacaucagcaucaccauccacagcgaguucuacaucauccccagaagccaggagagcaagugcaacgaguacaucaacaacggccugugaggacuaguuauaagacugacuagcccgaugggccucccaacgggcccuccuccccuccuugcaccgagauuaaucaaaggcucuuuucagagccaccaaaaaaaaaaaaaaaaaaaaaaaaaaaaaaaaaaaaaaaaaaaaaaaaaaaaaaaaaaaaaaaaaaaaaaaaaaaaaaaaaaaaaaaaaaaaaaaaaaaaa

SEQ ID NO: 1638 - RNA, 1260 nt, Artificial Sequence; identical to SEQ ID NO: 1637
  mRNA product Design i-3 (hSL-A100) comprising derived and/or modified sequence from RVA/Wa/P[8]__AAA66953.1__LumSynt_P2_VP8*(65-223) (opt4)

SEQ ID NO: 1639 - RNA, 1332 nt, Artificial Sequence
  mRNA product Design i-3 (hSL-A100) comprising derived and/or modified sequence from RVA/BE1058/P[4]__AEX30665.1__LumSynt_P2_VP8*(41-223) (opt4)
aggagaaagcuuaccaugcagaucuacgagggcaagcugaccgccgagggccugagauucggcaucguggccagcagauucaaccacgcccugguggacagacugguggagggcgccaucgacgccaucgugagacacggcggcagagaggaggacaucacccuggugagagugcccggcagcugggagauccccguggccgccggcgagcuggccagaaaggaggacaucgacgccgugaucgccaucggcgugcugaucagaggcgccaccccccacuucgacuacaucgccagcgaggugagcaagggccuggccgaccugagccuggagcugagaaagcccaucaccuucggcgugaucaccgccgacacccuggagcaggccaucgagagagccggcaccaagcacggcaacaagggcugggaggccgcccugagcgccaucgagauggccaaccuguucaagagccugagaggcggcagcggcggcagcggcggcagcggcggcagcggcggcggccaguacaucaaggccaacagcaaguucaucggcaucaccgagcugggcagcggcagcggcgcccagaccagauacgcccccgugaacuggggccacggcgagaucaacgacagcaccaccguggagcccgugcuggacggccccuaccagcccaccaccuucaagccccccaacgacuacuggcugcugaucagcagcaacaccgacggcgugguguacgagagcaccaacaacagcgacuucuggaccgccgugaucgccguggagccccacgugaaccagaccaacagacaguacgugcuguucggcgagaacaagcaguucaacaucgagaacagcagcgacaaguggaaguucuucgagauguucaagggcaacagccagagcgacuucagcaacagaagaacccugaccagcagcaacagacuggugggcaugcugaaguacggcggcagaguguggaccuuccacggcgagacccccagagccaccaccgacagcagcagcaccgccgaccugaacaacaucagcaucaucauccacagcgaguucuacaucauccccagaagccaggagagcaagugcaacgaguacaucaacaacggccugugaggacuaguuauaagacugacuagcccgaugggccucccaacgggcccuccuccccuccuugcaccgagauuaaucaaaggcucuuuucagagccaccaaaaaaaaaaaaaaaaaaaaaaaaaaaaaaaaaaaaaaaaaaaaaaaaaaaaaaaaaaaaaaaaaaaaaaaaaaaaaaaaaaaaaaaaaaaaaaaaaaaaa

SEQ ID NO: 1640 - RNA, 1332 nt, Artificial Sequence
  mRNA product Design i-3 (hSL-A100) comprising derived and/or modified sequence from RVA/DS-1/P[4]__CAD62680.1__LumSynt_P2_VP8*(41-223) (opt4)
aggagaaagcuuaccaugcagaucuacgagggcaagcugaccgccgagggccugagauucggcaucguggccagcagauucaaccacgcccugguggacagacugguggagggcgccaucgacgccaucgugagacacggcggcagagaggaggacaucacccuggugagagugcccggcagcugggagauccccguggccgccggcgagcuggccagaaaggaggacaucgacgccgugaucgccaucggcgugcugaucagaggcgccaccccccacuucgacuacaucgccagcgaggugagcaagggccuggccgaccugagccuggagcugagaaagcccaucaccuucggcgugaucaccgccgacacccuggagcaggccaucgagagagccggcaccaagcacggcaacaagggcugggaggccgcccugagcgccaucgagauggccaaccuguucaagagccugagaggcggcagcggcggcagcggcggcagcggcggcagcggcggcggccaguacaucaaggccaacagcaaguucaucggcaucaccgagcugggcagcggcagcggcgcccagaccagauacgcccccgugaacuggggcagcugggagaucaacgacagcaccaccguggagcccgugcuggacggccccuaccagcccaccaccuucaagccccccaacgacuacuggcugcugaucagcagcaacaccaacggcgugguguacgagagcaccaacaacaacgacuucuggaccgccgugagcagcguggagccccacgugagccagaccaacagacaguacauccuguucggcgagaacaagcaguucaacguggagaacaacagcgacaaguggaaguucuucgagaccuucaccggcagcagccagggcaacuucagcaacagaagaacccugaccagcagcaacagacuggugggcaugcugaaguacggcggcagaguguggaccuuccacggcgagacccccagagccaccaccgacagcagcaacaccgccgaccugaacaacaucagcaucaucauccacagcgaguucuacaucauccccagaagccaggagagcaagugcaacgaguacaucaacaacggccugugaggacuaguuauaagacugacuagcccgaugggccucccaacgggcccuccuccccuccuugcaccgagauuaaucaaaggcucuuuucagagccaccaaaaaaaaaaaaaaaaaaaaaaaaaaaaaaaaaaaaaaaaaaaaaaaaaaaaaaaaaaaaaaaaaaaaaaaaaaaaaaaaaaaaaaaaaaaaaaaaaaaaa

SEQ ID NO: 1641 - RNA, 1332 nt, Artificial Sequence; identical to SEQ ID NO: 1640
  mRNA product Design i-3 (hSL-A100) comprising derived and/or modified sequence from RVA/DS-1/P[4]__ABV53252.1__LumSynt_P2_VP8*(41-223) (opt4)

SEQ ID NO: 1642 - RNA, 1332 nt, Artificial Sequence
  mRNA product Design i-3 (hSL-A100) comprising derived and/or modified sequence from RVA/F01322/P[6]__AFA51886.1__LumSynt_P2_VP8*(41-223) (opt4)
aggagaaagcuuaccaugcagaucuacgagggcaagcugaccgccgagggccugagauucggcaucguggccagcagauucaaccacgcccugguggacagacugguggagggcgccaucgacgccaucgugagacacggcggcagagaggaggacaucacccuggugagagugcccggcagcugggagauccccguggccgccggcgagcuggccagaaaggaggacaucgacgccgugaucgccaucggcgugcugaucagaggcgccaccccccacuucgacuacaucgccagcgaggugagcaagggccuggccgaccugagccuggagcugagaaagcccaucaccuucggcgugaucaccgccgacacccuggagcaggccaucgagagagccggcaccaagcacggcaacaagggcugggaggccgcccugagcgccaucgagauggccaaccuguucaagagccugagaggcggcagcggcggcagcggcggcagcggcggcagcggcggcggccaguacaucaaggccaacagcaaguucaucggcaucaccgagcugggcagcggcagcggcgcccagaccaacuacgcccccgugaccuggagccacggcgaggugaacgacagcaccaccaucgagcccgugcuggacggccccuaccagcccaccaacuucaagccccccaacgacuacuggauccugcugaaccccaccaaccagcagguggugcuggagggcaccaacaagaccgacaucuggguggcccugcugcugguggagcccaacgugaccaaccagagcagacaguacacccuguucggcgagaccaagcagaucaccguggagaacaacaccaacaaguggaaguucuucgagauguucagaagcagcgugagcgccgaguuccagcacaagagaacccugaccagcgacaccaagcuggccggcuucaugaaguucuacaacagcguguggaccuuccacggcgagacccccaacgccaccaccgacuacagcagcaccagcaaccuguucgagguggagaccgugauccacguggaguucuacaucauccccagaagccaggagagcaagugcagcgaguacaucaacaccggccugugaggacuaguuauaagacugacuagcccgaugggccucccaacgggcccuccuccccuccuugcaccgagauuaaucaaaggcucuuuucagagccaccaaaaaaaaaaaaaaaaaaaaaaaaaaaaaaaaaaaaaaaaaaaaaaaaaaaaaaaaaaaaaaaaaaaaaaaaaaaaaaaaaaaaaaaaaaaaaaaaaaaaa

SEQ ID NO: 1643 - RNA, 1332 nt, Artificial Sequence
  mRNA product Design i-3 (hSL-A100) comprising derived and/or modified sequence from RVA/1076/P[6]__AAA47337.1__LumSynt_P2_VP8*(41-223) (opt4)
aggagaaagcuuaccaugcagaucuacgagggcaagcugaccgccgagggccugagauucggcaucguggccagcagauucaaccacgcccugguggacagacugguggagggcgccaucgacgccaucgugagacacggcggcagagaggaggacaucacccuggugagagugcccggcagcugggagauccccguggccgccggcgagcuggccagaaaggaggacaucgacgccgugaucgccaucggcgugcugaucagaggcgccaccccccacuucgacuacaucgccagcgaggugagcaagggccuggccgaccugagccuggagcugagaaagcccaucaccuucggcgugaucaccgccgacacccuggagcaggccaucgagagagccggcaccaagcacggcaacaagggcugggaggccgcccugagcgccaucgagauggccaaccuguucaagagccugagaggcggcagcggcggcagcggcggcagcggcggcagcggcggcggccaguacaucaaggccaacagcaaguucaucggcaucaccgagcugggcagcggcagcggcgcccagaccaacuacgcccccgugaccuggagccacggcgaggugaacgacagcaccaccaucgagcccgugcuggacggccccuaccagcccaccagcuucaagccccccagcgacuacuggauccugcugaaccccaccaaccagcagguggugcuggagggcaccaacaagaccgacaucuggguggcccugcugcugguggagcccaacgugaccaaccagagcagacaguacacccuguucggcgagaccaagcagaucaccguggagaacaacaccaacaaguggaaguucuucgagauguucagaagcagcgugagcgccgaguuccagcacaagagaacccugaccagcgacaccaagcuggccggcuuccugaaguucuacaacagcguguggaccuucuacggcgagaccccccacgccaccaccgacuacagcagcaccagcaaccugagcgagguggagaccgccauccacguggaguucuacaucauccccagaagccaggagagcaagugcaacgaguacaucaacaccggccugugaggacuaguuauaagacugacuagcccgaugggccucccaacgggcccuccuccccuccuugcaccgagauuaaucaaaggcucuuuucagagccaccaaaaaaaaaaaaaaaaaaaaaaaaaaaaaaaaaaaaaaaaaaaaaaaaaaaaaaaaaaaaaaaaaaaaaaaaaaaaaaaaaaaaaaaaaaaaaaaaaaaaa

SEQ ID NO: 1644 - RNA, 1332 nt, Artificial Sequence
  mRNA product Design i-3 (hSL-A100) comprising derived and/or modified sequence from RVA/BE1128/P[8]__AEX30671.1__LumSynt_P2_VP8*(41-223) (opt4)
aggagaaagcuuaccaugcagaucuacgagggcaagcugaccgccgagggccugagauucggcaucguggccagcagauucaaccacgcccugguggacagacugguggagggcgccaucgacgccaucgugagacacggcggcagagaggaggacaucacccuggugagagugcccggcagcugggagauccccguggccgccggcgagcuggccagaaaggaggacaucgacgccgugaucgccaucggcgugcugaucagaggcgccaccccccacuucgacuacaucgccagcgaggugagcaagggccuggccgaccugagccuggagcugagaaagcccaucaccuucggcgugaucaccgccgacacccuggagcaggccaucgagagagccggcaccaagcacggcaacaagggcugggaggccgcccugagcgccaucgagauggccaaccuguucaagagccugagaggcggcagcggcggcagcggcggcagcggcggcagcggcggcggccaguacaucaaggccaacagcaaguucaucggcaucaccgagcugggcagcggcagcggcgcccagaccagauacgcccccgugaacuggggccacggcgagaucaacgacagcaccaccguggagcccauccuggacggccccuaccagcccaccaccuucaccccccccaccgacuacuggauccugaucaccagcaacaccaacggcgugguguacgagagcaccaacaacagcgacuucuggaccgccgugaucgccguggagccccacgugaaccccguggacagacaguacaacguguucggcgagaacaagcaguucaacgugagaaacgacagcgacaaguggaaguuccuggagauguucagaggcagcagccagaacgacuucuacaacagaagaacccugaccagcgacaccagacuggugggcauccugaaguacggcggcagaguguggaccuuccacggcgagacccccagagccaccaccgacagcagcaacaccgccaaccuggacggcaucagcaucaccauccacagcgaguucuacaucauccccagaagccaggagagcaagugcaacgaguacaucaacaacggccugugaggacuaguuauaagacugacuagcccgaugggccucccaacgggcccuccuccccuccuugcaccgagauuaaucaaaggcucuuuucagagccaccaaaaaaaaaaaaaaaaaaaaaaaaaaaaaaaaaaaaaaaaaaaaaaaaaaaaaaaaaaaaaaaaaaaaaaaaaaaaaaaaaaaaaaaaaaaaaaaaaaaaa

SEQ ID NO: 1645 - RNA, 1332 nt, Artificial Sequence
  mRNA product Design i-3 (hSL-A100) comprising derived and/or modified sequence from RVA/Wa-VirWa/P[8]__ACR22783.1__LumSynt_P2_VP8*(41-223) (opt4)
aggagaaagcuuaccaugcagaucuacgagggcaagcugaccgccgagggccugagauucggcaucguggccagcagauucaaccacgcccugguggacagacugguggagggcgccaucgacgccaucgugagacacggcggcagagaggaggacaucacccuggugagagugcccggcagcugggagauccccguggccgccggcgagcuggccagaaaggaggacaucgacgccgugaucgccaucggcgugcugaucagaggcgccaccccccacuucgacuacaucgccagcgaggugagcaagggccuggccgaccugagccuggagcugagaaagcccaucaccuucggcgugaucaccgccgacacccuggagcaggccaucgagagagccggcaccaagcacggcaacaagggcugggaggccgcccugagcgccaucgagauggccaaccuguucaagagccugagaggcggcagcggcggcagcggcggcagcggcggcagcggcggcggccaguacaucaaggccaacagcaaguucaucggcaucaccgagcugggcagcggcagcggcgcccagaccagauacgcccccgugaacuggggccacggcgagaucaacgacagcaccaccguggagcccauccuggacggccccuaccagcccaccaccuucaccccccccaacgacuacuggauccugaucaacagcaacaccaacggcgugguguacgagagcaccaacaacagcgacuucuggaccgccgugguggccaucgagccccacgugaaccccguggacagacaguacaccaucuucggcgagagcaagcaguucaacgugagaaacgacagcaacaaguggaaguuccuggagauguucagaagcagcagccagaacgaguucuacaacagaagaacccugaccagcgacaccagacuggugggcauccugaaguacggcggcagaguguggaccuuccacggcgagacccccagagccaccaccgacagcagcagcaccgccaaccugaacaacaucagcaucaccauccacagcgaguucuacaucauccccagaagccaggagagcaagugcaacgaguacaucaacaacggccugugaggacuaguuauaagacugacuagcccgaugggccucccaacgggcccuccuccccuccuugcaccgagauuaaucaaaggcucuuuucagagccaccaaaaaaaaaaaaaaaaaaaaaaaaaaaaaaaaaaaaaaaaaaaaaaaaaaaaaaaaaaaaaaaaaaaaaaaaaaaaaaaaaaaaaaaaaaaaaaaaaaaaa

SEQ ID NO: 1646 - RNA, 1332 nt, Artificial Sequence
  mRNA product Design i-3 (hSL-A100) comprising derived and/or modified sequence from RVA/Wa/P[8]__AAA47290.1__LumSynt_P2_VP8*(41-223) (opt4)
aggagaaagcuuaccaugcagaucuacgagggcaagcugaccgccgagggccugagauucggcaucguggccagcagauucaaccacgcccugguggacagacugguggagggcgccaucgacgccaucgugagacacggcggcagagaggaggacaucacccuggugagagugcccggcagcugggagauccccguggccgccggcgagcuggccagaaaggaggacaucgacgccgugaucgccaucggcgugcugaucagaggcgccaccccccacuucgacuacaucgccagcgaggugagcaagggccuggccgaccugagccuggagcugagaaagcccaucaccuucggcgugaucaccgccgacacccuggagcaggccaucgagagagccggcaccaagcacggcaacaagggcugggaggccgcccugagcgccaucgagauggccaaccuguucaagagccugagaggcggcagcggcggcagcggcggcagcggcggcagcggcggcggccaguacaucaaggccaacagcaaguucaucggcaucaccgagcugggcagcggcagcggcgcccagaccagauacgcccccgugaacuggggccacggcgagaucaacgacagcaccaccguggagcccauccuggacggccccuaccagcccaccaccuucaccccccccaacgacuacuggauccugaucaacagcaacaccaacggcgugguguacgagagcaccaacaacagcgacuucuggaccgccgugguggccaucgagccccacgugaaccccguggacagacaguacaccaucuucggcgagagcaagcaguucaacgugagcaacgacagcaacaaguggaaguuccuggagauguucagaagcagcagccagaacgaguucuacaacagaagaacccugaccagcgacaccagauucgugggcauccugaaguacggcggcagaguguggaccuuccacggcgagacccccagagccaccaccgacagcagcagcaccgccaaccugaacaacaucagcaucaccauccacagcgaguucuacaucauccccagaagccaggagagcaagugcaacgaguacaucaacaacggccugugaggacuaguuauaagacugacuagcccgaugggccucccaacgggcccuccuccccuccuugcaccgagauuaaucaaaggcucuuuucagagccaccaaaaaaaaaaaaaaaaaaaaaaaaaaaaaaaaaaaaaaaaaaaaaaaaaaaaaaaaaaaaaaaaaaaaaaaaaaaaaaaaaaaaaaaaaaaaaaaaaaaaa

SEQ ID NO: 1647 - RNA, 1332 nt, Artificial Sequence
  mRNA product Design i-3 (hSL-A100) comprising derived and/or modified sequence from RVA/Wa/P[8]__AAA66953.1__LumSynt_P2_VP8*(41-223) (opt4)
aggagaaagcuuaccaugcagaucuacgagggcaagcugaccgccgagggccugagauucggcaucguggccagcagauucaaccacgcccugguggacagacugguggagggcgccaucgacgccaucgugagacacggcggcagagaggaggacaucacccuggugagagugcccggcagcugggagauccccguggccgccggcgagcuggccagaaaggaggacaucgacgccgugaucgccaucggcgugcugaucagaggcgccaccccccacuucgacuacaucgccagcgaggugagcaagggccuggccgaccugagccuggagcugagaaagcccaucaccuucggcgugaucaccgccgacacccuggagcaggccaucgagagagccggcaccaagcacggcaacaagggcugggaggccgcccugagcgccaucgagauggccaaccuguucaagagccugagaggcggcagcggcggcagcggcggcagcggcggcagcggcggcggccaguacaucaaggccaacagcaaguucaucggcaucaccgagcugggcagcggcagcggcgcccagaccagauacgcccccgugaacuggggccacggcgagaucaacgacagcaccaccguggagcccaugcuggacggccccuaccagcccaccaccuucaccccccccaacgacuacuggauccugaucaacagcaacaccaacggcgugguguacgagagcaccaacaacagcgacuucuggaccgccgugguggccaucgagccccacgugaaccccguggacagacaguacaccaucuucggcgagagcaagcaguucaacgugagcaacgacagcaacaaguggaaguuccuggagauguucagaagcagcagccagaacgaguucuacaacagaagaacccugaccagcgacaccagauucgugggcauccugaaguacggcggcagaguguggaccuuccacggcgagacccccagagccaccaccgacagcagcagcaccgccaaccugaacaacaucagcaucaccauccacagcgaguucuacaucauccccagaagccaggagagcaagugcaacgaguacaucaacaacggccugugaggacuaguuauaagacugacuagcccgaugggccucccaacgggcccuccuccccuccuugcaccgagauuaaucaaaggcucuuuucagagccaccaaaaaaaaaaaaaaaaaaaaaaaaaaaaaaaaaaaaaaaaaaaaaaaaaaaaaaaaaaaaaaaaaaaaaaaaaaaaaaaaaaaaaaaaaaaaaaaaaaaaa

SEQ ID NO: 1648 - RNA, 807 nt, Artificial Sequence
  mRNA product Design i-3 (hSL-A100) comprising derived and/or modified sequence from RVA/BE1058/P[4]__AEX30665.1__SP-IgE_P2_VP8*(65-223) (opt4)
aggagaaagcuuaccauggacuggaccuggauccuguuccugguggccgccgccaccagagugcacagccaguacaucaaggccaacagcaaguucaucggcaucaccgagcugggcagcggcagcggccuggacggccccuaccagcccaccaccuucaagccccccaacgacuacuggcugcugaucagcagcaacaccgacggcgugguguacgagagcaccaacaacagcgacuucuggaccgccgugaucgccguggagccccacgugaaccagaccaacagacaguacgugcuguucggcgagaacaagcaguucaacaucgagaacagcagcgacaaguggaaguucuucgagauguucaagggcaacagccagagcgacuucagcaacagaagaacccugaccagcagcaacagacuggugggcaugcugaaguacggcggcagaguguggaccuuccacggcgagacccccagagccaccaccgacagcagcagcaccgccgaccugaacaacaucagcaucaucauccacagcgaguucuacaucauccccagaagccaggagagcaagugcaacgaguacaucaacaacggccugugaggacuaguuauaagacugacuagcccgaugggccucccaacgggcccuccuccccuccuugcaccgagauuaaucaaaggcucuuuucagagccaccaaaaaaaaaaaaaaaaaaaaaaaaaaaaaaaaaaaaaaaaaaaaaaaaaaaaaaaaaaaaaaaaaaaaaaaaaaaaaaaaaaaaaaaaaaaaaaaaaaaaa

SEQ ID NO: 1649 - RNA, 807 nt, Artificial Sequence
  mRNA product Design i-3 (hSL-A100) comprising derived and/or modified sequence from RVA/DS-1/P[4]__CAD62680.1__SP-IgE_P2_VP8*(65-223) (opt4)
aggagaaagcuuaccauggacuggaccuggauccuguuccugguggccgccgccaccagagugcacagccaguacaucaaggccaacagcaaguucaucggcaucaccgagcugggcagcggcagcggccuggacggccccuaccagcccaccaccuucaagccccccaacgacuacuggcugcugaucagcagcaacaccaacggcgugguguacgagagcaccaacaacaacgacuucuggaccgccgugagcagcguggagccccacgugagccagaccaacagacaguacauccuguucggcgagaacaagcaguucaacguggagaacaacagcgacaaguggaaguucuucgagaccuucaccggcagcagccagggcaacuucagcaacagaagaacccugaccagcagcaacagacuggugggcaugcugaaguacggcggcagaguguggaccuuccacggcgagacccccagagccaccaccgacagcagcaacaccgccgaccugaacaacaucagcaucaucauccacagcgaguucuacaucauccccagaagccaggagagcaagugcaacgaguacaucaacaacggccugugaggacuaguuauaagacugacuagcccgaugggccucccaacgggcccuccuccccuccuugcaccgagauuaaucaaaggcucuuuucagagccaccaaaaaaaaaaaaaaaaaaaaaaaaaaaaaaaaaaaaaaaaaaaaaaaaaaaaaaaaaaaaaaaaaaaaaaaaaaaaaaaaaaaaaaaaaaaaaaaaaaaaa

SEQ ID NO: 1650 - RNA, 807 nt, Artificial Sequence; identical to SEQ ID NO: 1649
  mRNA product Design i-3 (hSL-A100) comprising derived and/or modified sequence from RVA/DS-1/P[4]__ABV53252.1__SP-IgE_P2_VP8*(65-223) (opt4)

SEQ ID NO: 1651 - RNA, 807 nt, Artificial Sequence
  mRNA product Design i-3 (hSL-A100) comprising derived and/or modified sequence from RVA/F01322/P[6]__AFA51886.1__SP-IgE_P2_VP8*(65-223) (opt4)
aggagaaagcuuaccauggacuggaccuggauccuguuccugguggccgccgccaccagagugcacagccaguacaucaaggccaacagcaaguucaucggcaucaccgagcugggcagcggcagcggccuggacggccccuaccagcccaccaacuucaagccccccaacgacuacuggauccugcugaaccccaccaaccagcagguggugcuggagggcaccaacaagaccgacaucuggguggcccugcugcugguggagcccaacgugaccaaccagagcagacaguacacccuguucggcgagaccaagcagaucaccguggagaacaacaccaacaaguggaaguucuucgagauguucagaagcagcgugagcgccgaguuccagcacaagagaacccugaccagcgacaccaagcuggccggcuucaugaaguucuacaacagcguguggaccuuccacggcgagacccccaacgccaccaccgacuacagcagcaccagcaaccuguucgagguggagaccgugauccacguggaguucuacaucauccccagaagccaggagagcaagugcagcgaguacaucaacaccggccugugaggacuaguuauaagacugacuagcccgaugggccucccaacgggcccuccuccccuccuugcaccgagauuaaucaaaggcucuuuucagagccaccaaaaaaaaaaaaaaaaaaaaaaaaaaaaaaaaaaaaaaaaaaaaaaaaaaaaaaaaaaaaaaaaaaaaaaaaaaaaaaaaaaaaaaaaaaaaaaaaaaaaa

SEQ ID NO: 1652 - RNA, 807 nt, Artificial Sequence
  mRNA product Design i-3 (hSL-A100) comprising derived and/or modified sequence from RVA/1076/P[6]__AAA47337.1__SP-IgE_P2_VP8*(65-223) (opt4)
aggagaaagcuuaccauggacuggaccuggauccuguuccugguggccgccgccaccagagugcacagccaguacaucaaggccaacagcaaguucaucggcaucaccgagcugggcagcggcagcggccuggacggccccuaccagcccaccagcuucaagccccccagcgacuacuggauccugcugaaccccaccaaccagcagguggugcuggagggcaccaacaagaccgacaucuggguggcccugcugcugguggagcccaacgugaccaaccagagcagacaguacacccuguucggcgagaccaagcagaucaccguggagaacaacaccaacaaguggaaguucuucgagauguucagaagcagcgugagcgccgaguuccagcacaagagaacccugaccagcgacaccaagcuggccggcuuccugaaguucuacaacagcguguggaccuucuacggcgagaccccccacgccaccaccgacuacagcagcaccagcaaccugagcgagguggagaccgccauccacguggaguucuacaucauccccagaagccaggagagcaagugcaacgaguacaucaacaccggccugugaggacuaguuauaagacugacuagcccgaugggccucccaacgggcccuccuccccuccuugcaccgagauuaaucaaaggcucuuuucagagccaccaaaaaaaaaaaaaaaaaaaaaaaaaaaaaaaaaaaaaaaaaaaaaaaaaaaaaaaaaaaaaaaaaaaaaaaaaaaaaaaaaaaaaaaaaaaaaaaaaaaaa

SEQ ID NO: 1653 - RNA, 807 nt, Artificial Sequence
  mRNA product Design i-3 (hSL-A100) comprising derived and/or modified sequence from RVA/BE1128/P[8]__AEX30671.1__SP-IgE_P2_VP8*(65-223) (opt4)
aggagaaagcuuaccauggacuggaccuggauccuguuccugguggccgccgccaccagagugcacagccaguacaucaaggccaacagcaaguucaucggcaucaccgagcugggcagcggcagcggccuggacggccccuaccagcccaccaccuucaccccccccaccgacuacuggauccugaucaccagcaacaccaacggcgugguguacgagagcaccaacaacagcgacuucuggaccgccgugaucgccguggagccccacgugaaccccguggacagacaguacaacguguucggcgagaacaagcaguucaacgugagaaacgacagcgacaaguggaaguuccuggagauguucagaggcagcagccagaacgacuucuacaacagaagaacccugaccagcgacaccagacuggugggcauccugaaguacggcggcagaguguggaccuuccacggcgagacccccagagccaccaccgacagcagcaacaccgccaaccuggacggcaucagcaucaccauccacagcgaguucuacaucauccccagaagccaggagagcaagugcaacgaguacaucaacaacggccugugaggacuaguuauaagacugacuagcccgaugggccucccaacgggcccuccuccccuccuugcaccgagauuaaucaaaggcucuuuucagagccaccaaaaaaaaaaaaaaaaaaaaaaaaaaaaaaaaaaaaaaaaaaaaaaaaaaaaaaaaaaaaaaaaaaaaaaaaaaaaaaaaaaaaaaaaaaaaaaaaaaaaa

SEQ ID NO: 1654 - RNA, 807 nt, Artificial Sequence
  mRNA product Design i-3 (hSL-A100) comprising derived and/or modified sequence from RVA/Wa-VirWa/P[8]__ACR22783.1__SP-IgE_P2_VP8*(65-223) (opt4)
aggagaaagcuuaccauggacuggaccuggauccuguuccugguggccgccgccaccagagugcacagccaguacaucaaggccaacagcaaguucaucggcaucaccgagcugggcagcggcagcggccuggacggccccuaccagcccaccaccuucaccccccccaacgacuacuggauccugaucaacagcaacaccaacggcgugguguacgagagcaccaacaacagcgacuucuggaccgccgugguggccaucgagccccacgugaaccccguggacagacaguacaccaucuucggcgagagcaagcaguucaacgugagaaacgacagcaacaaguggaaguuccuggagauguucagaagcagcagccagaacgaguucuacaacagaagaacccugaccagcgacaccagacuggugggcauccugaaguacggcggcagaguguggaccuuccacggcgagacccccagagccaccaccgacagcagcagcaccgccaaccugaacaacaucagcaucaccauccacagcgaguucuacaucauccccagaagccaggagagcaagugcaacgaguacaucaacaacggccugugaggacuaguuauaagacugacuagcccgaugggccucccaacgggcccuccuccccuccuugcaccgagauuaaucaaaggcucuuuucagagccaccaaaaaaaaaaaaaaaaaaaaaaaaaaaaaaaaaaaaaaaaaaaaaaaaaaaaaaaaaaaaaaaaaaaaaaaaaaaaaaaaaaaaaaaaaaaaaaaaaaaaa

SEQ ID NO: 1655 - RNA, 807 nt, Artificial Sequence
  mRNA product Design i-3 (hSL-A100) comprising derived and/or modified sequence from RVA/Wa/P[8]__AAA47290.1__SP-IgE_P2_VP8*(65-223) (opt4)
aggagaaagcuuaccauggacuggaccuggauccuguuccugguggccgccgccaccagagugcacagccaguacaucaaggccaacagcaaguucaucggcaucaccgagcugggcagcggcagcggccuggacggccccuaccagcccaccaccuucaccccccccaacgacuacuggauccugaucaacagcaacaccaacggcgugguguacgagagcaccaacaacagcgacuucuggaccgccgugguggccaucgagccccacgugaaccccguggacagacaguacaccaucuucggcgagagcaagcaguucaacgugagcaacgacagcaacaaguggaaguuccuggagauguucagaagcagcagccagaacgaguucuacaacagaagaacccugaccagcgacaccagauucgugggcauccugaaguacggcggcagaguguggaccuuccacggcgagacccccagagccaccaccgacagcagcagcaccgccaaccugaacaacaucagcaucaccauccacagcgaguucuacaucauccccagaagccaggagagcaagugcaacgaguacaucaacaacggccugugaggacuaguuauaagacugacuagcccgaugggccucccaacgggcccuccuccccuccuugcaccgagauuaaucaaaggcucuuuucagagccaccaaaaaaaaaaaaaaaaaaaaaaaaaaaaaaaaaaaaaaaaaaaaaaaaaaaaaaaaaaaaaaaaaaaaaaaaaaaaaaaaaaaaaaaaaaaaaaaaaaaaa

SEQ ID NO: 1656 - RNA, 807 nt, Artificial Sequence; identical to SEQ ID NO: 1655
  mRNA product Design i-3 (hSL-A100) comprising derived and/or modified sequence from RVA/Wa/P[8]__AAA66953.1__SP-IgE_P2_VP8*(65-223) (opt4)

SEQ ID NO: 1657 - RNA, 879 nt, Artificial Sequence
  mRNA product Design i-3 (hSL-A100) comprising derived and/or modified sequence from RVA/BE1058/P[4]__AEX30665.1__SP-IgE_P2_VP8*(41-223) (opt4)
aggagaaagcuuaccauggacuggaccuggauccuguuccugguggccgccgccaccagagugcacagccaguacaucaaggccaacagcaaguucaucggcaucaccgagcugggcagcggcagcggcgcccagaccagauacgcccccgugaacuggggccacggcgagaucaacgacagcaccaccguggagcccgugcuggacggccccuaccagcccaccaccuucaagccccccaacgacuacuggcugcugaucagcagcaacaccgacggcgugguguacgagagcaccaacaacagcgacuucuggaccgccgugaucgccguggagccccacgugaaccagaccaacagacaguacgugcuguucggcgagaacaagcaguucaacaucgagaacagcagcgacaaguggaaguucuucgagauguucaagggcaacagccagagcgacuucagcaacagaagaacccugaccagcagcaacagacuggugggcaugcugaaguacggcggcagaguguggaccuuccacggcgagacccccagagccaccaccgacagcagcagcaccgccgaccugaacaacaucagcaucaucauccacagcgaguucuacaucauccccagaagccaggagagcaagugcaacgaguacaucaacaacggccugugaggacuaguuauaagacugacuagcccgaugggccucccaacgggcccuccuccccuccuugcaccgagauuaaucaaaggcucuuuucagagccaccaaaaaaaaaaaaaaaaaaaaaaaaaaaaaaaaaaaaaaaaaaaaaaaaaaaaaaaaaaaaaaaaaaaaaaaaaaaaaaaaaaaaaaaaaaaaaaaaaaaaa

SEQ ID NO: 1658 - RNA, 879 nt, Artificial Sequence
  mRNA product Design i-3 (hSL-A100) comprising derived and/or modified sequence from RVA/DS-1/P[4]__CAD62680.1__SP-IgE_P2_VP8*(41-223) (opt4)
aggagaaagcuuaccauggacuggaccuggauccuguuccugguggccgccgccaccagagugcacagccaguacaucaaggccaacagcaaguucaucggcaucaccgagcugggcagcggcagcggcgcccagaccagauacgcccccgugaacuggggcagcugggagaucaacgacagcaccaccguggagcccgugcuggacggccccuaccagcccaccaccuucaagccccccaacgacuacuggcugcugaucagcagcaacaccaacggcgugguguacgagagcaccaacaacaacgacuucuggaccgccgugagcagcguggagccccacgugagccagaccaacagacaguacauccuguucggcgagaacaagcaguucaacguggagaacaacagcgacaaguggaaguucuucgagaccuucaccggcagcagccagggcaacuucagcaacagaagaacccugaccagcagcaacagacuggugggcaugcugaaguacggcggcagaguguggaccuuccacggcgagacccccagagccaccaccgacagcagcaacaccgccgaccugaacaacaucagcaucaucauccacagcgaguucuacaucauccccagaagccaggagagcaagugcaacgaguacaucaacaacggccugugaggacuaguuauaagacugacuagcccgaugggccucccaacgggcccuccuccccuccuugcaccgagauuaaucaaaggcucuuuucagagccaccaaaaaaaaaaaaaaaaaaaaaaaaaaaaaaaaaaaaaaaaaaaaaaaaaaaaaaaaaaaaaaaaaaaaaaaaaaaaaaaaaaaaaaaaaaaaaaaaaaaaa

SEQ ID NO: 1659 - RNA, 879 nt, Artificial Sequence; identical to SEQ ID NO: 1658
  mRNA product Design i-3 (hSL-A100) comprising derived and/or modified sequence from RVA/DS-1/P[4]__ABV53252.1__SP-IgE_P2_VP8*(41-223) (opt4)

SEQ ID NO: 1660 - RNA, 879 nt, Artificial Sequence
  mRNA product Design i-3 (hSL-A100) comprising derived and/or modified sequence from RVA/F01322/P[6]__AFA51886.1__SP-IgE_P2_VP8*(41-223) (opt4)
aggagaaagcuuaccauggacuggaccuggauccuguuccugguggccgccgccaccagagugcacagccaguacaucaaggccaacagcaaguucaucggcaucaccgagcugggcagcggcagcggcgcccagaccaacuacgcccccgugaccuggagccacggcgaggugaacgacagcaccaccaucgagcccgugcuggacggccccuaccagcccaccaacuucaagccccccaacgacuacuggauccugcugaaccccaccaaccagcagguggugcuggagggcaccaacaagaccgacaucuggguggcccugcugcugguggagcccaacgugaccaaccagagcagacaguacacccuguucggcgagaccaagcagaucaccguggagaacaacaccaacaaguggaaguucuucgagauguucagaagcagcgugagcgccgaguuccagcacaagagaacccugaccagcgacaccaagcuggccggcuucaugaaguucuacaacagcguguggaccuuccacggcgagacccccaacgccaccaccgacuacagcagcaccagcaaccuguucgagguggagaccgugauccacguggaguucuacaucauccccagaagccaggagagcaagugcagcgaguacaucaacaccggccugugaggacuaguuauaagacugacuagcccgaugggccucccaacgggcccuccuccccuccuugcaccgagauuaaucaaaggcucuuuucagagccaccaaaaaaaaaaaaaaaaaaaaaaaaaaaaaaaaaaaaaaaaaaaaaaaaaaaaaaaaaaaaaaaaaaaaaaaaaaaaaaaaaaaaaaaaaaaaaaaaaaaaa

SEQ ID NO: 1661 - RNA, 879 nt, Artificial Sequence
  mRNA product Design i-3 (hSL-A100) comprising derived and/or modified sequence from RVA/1076/P[6]__AAA47337.1__SP-IgE_P2_VP8*(41-223) (opt4)
aggagaaagcuuaccauggacuggaccuggauccuguuccugguggccgccgccaccagagugcacagccaguacaucaaggccaacagcaaguucaucggcaucaccgagcugggcagcggcagcggcgcccagaccaacuacgcccccgugaccuggagccacggcgaggugaacgacagcaccaccaucgagcccgugcuggacggccccuaccagcccaccagcuucaagccccccagcgacuacuggauccugcugaaccccaccaaccagcagguggugcuggagggcaccaacaagaccgacaucuggguggcccugcugcugguggagcccaacgugaccaaccagagcagacaguacacccuguucggcgagaccaagcagaucaccguggagaacaacaccaacaaguggaaguucuucgagauguucagaagcagcgugagcgccgaguuccagcacaagagaacccugaccagcgacaccaagcuggccggcuuccugaaguucuacaacagcguguggaccuucuacggcgagaccccccacgccaccaccgacuacagcagcaccagcaaccugagcgagguggagaccgccauccacguggaguucuacaucauccccagaagccaggagagcaagugcaacgaguacaucaacaccggccugugaggacuaguuauaagacugacuagcccgaugggccucccaacgggcccuccuccccuccuugcaccgagauuaaucaaaggcucuuuucagagccaccaaaaaaaaaaaaaaaaaaaaaaaaaaaaaaaaaaaaaaaaaaaaaaaaaaaaaaaaaaaaaaaaaaaaaaaaaaaaaaaaaaaaaaaaaaaaaaaaaaaaa

SEQ ID NO: 1662 - RNA, 879 nt, Artificial Sequence
  mRNA product Design i-3 (hSL-A100) comprising derived and/or modified sequence from RVA/BE1128/P[8]__AEX30671.1__SP-IgE_P2_VP8*(41-223) (opt4)
aggagaaagcuuaccauggacuggaccuggauccuguuccugguggccgccgccaccagagugcacagccaguacaucaaggccaacagcaaguucaucggcaucaccgagcugggcagcggcagcggcgcccagaccagauacgcccccgugaacuggggccacggcgagaucaacgacagcaccaccguggagcccauccuggacggccccuaccagcccaccaccuucaccccccccaccgacuacuggauccugaucaccagcaacaccaacggcgugguguacgagagcaccaacaacagcgacuucuggaccgccgugaucgccguggagccccacgugaaccccguggacagacaguacaacguguucggcgagaacaagcaguucaacgugagaaacgacagcgacaaguggaaguuccuggagauguucagaggcagcagccagaacgacuucuacaacagaagaacccugaccagcgacaccagacuggugggcauccugaaguacggcggcagaguguggaccuuccacggcgagacccccagagccaccaccgacagcagcaacaccgccaaccuggacggcaucagcaucaccauccacagcgaguucuacaucauccccagaagccaggagagcaagugcaacgaguacaucaacaacggccugugaggacuaguuauaagacugacuagcccgaugggccucccaacgggcccuccuccccuccuugcaccgagauuaaucaaaggcucuuuucagagccaccaaaaaaaaaaaaaaaaaaaaaaaaaaaaaaaaaaaaaaaaaaaaaaaaaaaaaaaaaaaaaaaaaaaaaaaaaaaaaaaaaaaaaaaaaaaaaaaaaaaaa

SEQ ID NO: 1663 - RNA, 879 nt, Artificial Sequence
  mRNA product Design i-3 (hSL-A100) comprising derived and/or modified sequence from RVA/Wa-VirWa/P[8]__ACR22783.1__SP-IgE_P2_VP8*(41-223) (opt4)
aggagaaagcuuaccauggacuggaccuggauccuguuccugguggccgccgccaccagagugcacagccaguacaucaaggccaacagcaaguucaucggcaucaccgagcugggcagcggcagcggcgcccagaccagauacgcccccgugaacuggggccacggcgagaucaacgacagcaccaccguggagcccauccuggacggccccuaccagcccaccaccuucaccccccccaacgacuacuggauccugaucaacagcaacaccaacggcgugguguacgagagcaccaacaacagcgacuucuggaccgccgugguggccaucgagccccacgugaaccccguggacagacaguacaccaucuucggcgagagcaagcaguucaacgugagaaacgacagcaacaaguggaaguuccuggagauguucagaagcagcagccagaacgaguucuacaacagaagaacccugaccagcgacaccagacuggugggcauccugaaguacggcggcagaguguggaccuuccacggcgagacccccagagccaccaccgacagcagcagcaccgccaaccugaacaacaucagcaucaccauccacagcgaguucuacaucauccccagaagccaggagagcaagugcaacgaguacaucaacaacggccugugaggacuaguuauaagacugacuagcccgaugggccucccaacgggcccuccuccccuccuugcaccgagauuaaucaaaggcucuuuucagagccaccaaaaaaaaaaaaaaaaaaaaaaaaaaaaaaaaaaaaaaaaaaaaaaaaaaaaaaaaaaaaaaaaaaaaaaaaaaaaaaaaaaaaaaaaaaaaaaaaaaaaa

SEQ ID NO: 1664 - RNA, 879 nt, Artificial Sequence
  mRNA product Design i-3 (hSL-A100) comprising derived and/or modified sequence from RVA/Wa/P[8]__AAA47290.1__SP-IgE_P2_VP8*(41-223) (opt4)
aggagaaagcuuaccauggacuggaccuggauccuguuccugguggccgccgccaccagagugcacagccaguacaucaaggccaacagcaaguucaucggcaucaccgagcugggcagcggcagcggcgcccagaccagauacgcccccgugaacuggggccacggcgagaucaacgacagcaccaccguggagcccauccuggacggccccuaccagcccaccaccuucaccccccccaacgacuacuggauccugaucaacagcaacaccaacggcgugguguacgagagcaccaacaacagcgacuucuggaccgccgugguggccaucgagccccacgugaaccccguggacagacaguacaccaucuucggcgagagcaagcaguucaacgugagcaacgacagcaacaaguggaaguuccuggagauguucagaagcagcagccagaacgaguucuacaacagaagaacccugaccagcgacaccagauucgugggcauccugaaguacggcggcagaguguggaccuuccacggcgagacccccagagccaccaccgacagcagcagcaccgccaaccugaacaacaucagcaucaccauccacagcgaguucuacaucauccccagaagccaggagagcaagugcaacgaguacaucaacaacggccugugaggacuaguuauaagacugacuagcccgaugggccucccaacgggcccuccuccccuccuugcaccgagauuaaucaaaggcucuuuucagagccaccaaaaaaaaaaaaaaaaaaaaaaaaaaaaaaaaaaaaaaaaaaaaaaaaaaaaaaaaaaaaaaaaaaaaaaaaaaaaaaaaaaaaaaaaaaaaaaaaaaaaa

SEQ ID NO: 1665 - RNA, 879 nt, Artificial Sequence
  mRNA product Design i-3 (hSL-A100) comprising derived and/or modified sequence from RVA/Wa/P[8]__AAA66953.1__SP-IgE_P2_VP8*(41-223) (opt4)
aggagaaagcuuaccauggacuggaccuggauccuguuccugguggccgccgccaccagagugcacagccaguacaucaaggccaacagcaaguucaucggcaucaccgagcugggcagcggcagcggcgcccagaccagauacgcccccgugaacuggggccacggcgagaucaacgacagcaccaccguggagcccaugcuggacggccccuaccagcccaccaccuucaccccccccaacgacuacuggauccugaucaacagcaacaccaacggcgugguguacgagagcaccaacaacagcgacuucuggaccgccgugguggccaucgagccccacgugaaccccguggacagacaguacaccaucuucggcgagagcaagcaguucaacgugagcaacgacagcaacaaguggaaguuccuggagauguucagaagcagcagccagaacgaguucuacaacagaagaacccugaccagcgacaccagauucgugggcauccugaaguacggcggcagaguguggaccuuccacggcgagacccccagagccaccaccgacagcagcagcaccgccaaccugaacaacaucagcaucaccauccacagcgaguucuacaucauccccagaagccaggagagcaagugcaacgaguacaucaacaacggccugugaggacuaguuauaagacugacuagcccgaugggccucccaacgggcccuccuccccuccuugcaccgagauuaaucaaaggcucuuuucagagccaccaaaaaaaaaaaaaaaaaaaaaaaaaaaaaaaaaaaaaaaaaaaaaaaaaaaaaaaaaaaaaaaaaaaaaaaaaaaaaaaaaaaaaaaaaaaaaaaaaaaaa

SEQ ID NO: 1666 - RNA, 756 nt, Artificial Sequence
  mRNA product Design i-3 (hSL-A100) comprising derived and/or modified sequence from RVA/BE1058/P[4]__AEX30665.1__P2_VP8*(65-223) (opt5)
aggagaaagcuuaccaugcaguacaucaaggccaacagcaaauucauuggcaucaccgagcugggguccggaucuggccucgacgggcccuaucaaccuacaacguuuaagccgcccaaugauuacuggcugcuuauuagcuccaacaccgacggaguggucuaugaaucuacaaauaacagcgauuucuggaccgcuguuaucgccguggagccucacgugaaucagacaaacagacaguacguccuguuuggcgaaaauaaacaguucaacauugagaauagcucugacaaguggaaauuuuucgaaauguuuaaggggaacagccaauccgauuucagcaaucggcgcacccucacaucuuccaacagacuggugggaaugcuuaaguauggcggccggguuuggaccuuucauggggagacgccccgcgcgaccacagacuccucuuccaccgcugaucugaauaacaucagcaucauuauccacucugaguucuacauuaucccuagaucccaggaaagcaaaugcaaugaguauauuaacaacggacucugaggacuaguuauaagacugacuagcccgaugggccucccaacgggcccuccuccccuccuugcaccgagauuaaucaaaggcucuuuucagagccaccaaaaaaaaaaaaaaaaaaaaaaaaaaaaaaaaaaaaaaaaaaaaaaaaaaaaaaaaaaaaaaaaaaaaaaaaaaaaaaaaaaaaaaaaaaaaaaaaaaaaa

SEQ ID NO: 1667 - RNA, 756 nt, Artificial Sequence
  mRNA product Design i-3 (hSL-A100) comprising derived and/or modified sequence from RVA/DS-1/P[4]__CAD62680.1__P2_VP8*(65-223) (opt5)
aggagaaagcuuaccaugcaguacaucaaggccaacagcaaauucauuggcaucaccgagcugggguccggaucuggccucgacgggcccuaucaaccuacaacguuuaagccgcccaaugauuacuggcugcuuauuagcuccaacaccaauggaguggucuaugaaucuacaaacaauaacgacuucuggaccgcuguuagcuccguggagccucacgugucucagacaaauagacaguacauccuguuuggcgaaaacaaacaguucaaugucgagaacaauagcgauaaguggaaauuuuucgaaaccuuuacaggguccagccaaggaaacuucucuaaucggcgcacccucacguccagcaacagacuggugggcaugcuuaaguauggcgggcggguuuggaccuuucauggagagacaccccgcgccaccacagacucuuccaauaccgcggaucugaacaacauuagcaucaucauucacucugaguucuacaucauuccuagaucccaggaaagcaagugcaaugaguauaucaacaauggccucugaggacuaguuauaagacugacuagcccgaugggccucccaacgggcccuccuccccuccuugcaccgagauuaaucaaaggcucuuuucagagccaccaaaaaaaaaaaaaaaaaaaaaaaaaaaaaaaaaaaaaaaaaaaaaaaaaaaaaaaaaaaaaaaaaaaaaaaaaaaaaaaaaaaaaaaaaaaaaaaaaaaaa

SEQ ID NO: 1668 - RNA, 756 nt, Artificial Sequence; identical to SEQ ID NO: 1667
  mRNA product Design i-3 (hSL-A100) comprising derived and/or modified sequence from RVA/DS-1/P[4]__ABV53252.1__P2_VP8*(65-223) (opt5)

SEQ ID NO: 1669 - RNA, 756 nt, Artificial Sequence
  mRNA product Design i-3 (hSL-A100) comprising derived and/or modified sequence from RVA/F01322/P[6]__AFA51886.1__P2_VP8*(65-223) (opt5)
aggagaaagcuuaccaugcaguacaucaaggccaacagcaaauucauuggcaucaccgagcugggguccggaucuggccucgacgggcccuaucaaccuacaaauuuuaagccgcccaacgauuacuggauucugcuuaauccuacgaaccaacaggugguccuggaaggaaccaauaaaacagacaucuggguugcucuccugcuuguggagcccaacgugaccaaucagagcagacaguauacacuguucggcgaaaccaagcagauuacagucgagaacaauaccaacaaauggaaguuuuucgaaauguuucgguccucugugagcgccgaguuccagcacaagcgcacgcucaccuccgauacaaaacuggcgggguuuaugaaguucuacaauucuguuuggaccuuucauggagagacaccuaacgcuaccacggacuauagcuccacaagcaaucuguucgaaguggagaccgucauccacguggaauuuuacaucauucccagaucucaggaguccaaaugcagcgaguauaucaacacaggccucugaggacuaguuauaagacugacuagcccgaugggccucccaacgggcccuccuccccuccuugcaccgagauuaaucaaaggcucuuuucagagccaccaaaaaaaaaaaaaaaaaaaaaaaaaaaaaaaaaaaaaaaaaaaaaaaaaaaaaaaaaaaaaaaaaaaaaaaaaaaaaaaaaaaaaaaaaaaaaaaaaaaaa

SEQ ID NO: 1670 - RNA, 756 nt, Artificial Sequence
  mRNA product Design i-3 (hSL-A100) comprising derived and/or modified sequence from RVA/1076/P[6]__AAA47337.1__P2_VP8*(65-223) (opt5)
aggagaaagcuuaccaugcaguacaucaaggccaacagcaaauucauuggcaucaccgagcugggguccggaucuggccucgacgggcccuaucaaccuacgagcuuuaagccgcccuccgauuacuggauucugcuuaauccuacaaaccaacaggugguccuggaaggaaccaauaaaacagacaucuggguugcucuccugcuuguggagcccaacgugaccaaucagucuagacaguauacacuguucggcgaaaccaagcagauuacagucgagaacaauaccaacaaauggaaguuuuucgaaauguuucggagcuccgugucugccgaguuccagcacaagcgcacgcucaccagcgauacaaaacuggcgggguuucugaaguucuacaauuccguuuggaccuuuuauggagagacaccucaugcuaccacggacuacagcucuacauccaaccucagcgaaguggagaccgccauccacgucgaguucuauaucauucccagaucucaggaauccaaaugcaaugaguacaucaacacaggccugugaggacuaguuauaagacugacuagcccgaugggccucccaacgggcccuccuccccuccuugcaccgagauuaaucaaaggcucuuuucagagccaccaaaaaaaaaaaaaaaaaaaaaaaaaaaaaaaaaaaaaaaaaaaaaaaaaaaaaaaaaaaaaaaaaaaaaaaaaaaaaaaaaaaaaaaaaaaaaaaaaaaaa

SEQ ID NO: 1671 - RNA, 756 nt, Artificial Sequence
  mRNA product Design i-3 (hSL-A100) comprising derived and/or modified sequence from RVA/BE1128/P[8]__AEX30671.1__P2_VP8*(65-223) (opt5)
aggagaaagcuuaccaugcaguacaucaaggccaacagcaaauucauuggcaucaccgagcugggguccggaucuggccucgacgggcccuaucaaccuacaacguuuaccccgcccacagauuacuggauucugaucaccagcaauacaaacggaguggucuaugaauccaccaauaacucugacuucuggacagcuguuauugccguggagccucacgugaaucccgucgauagacaguacaacguguuuggcgaaaauaagcaguucaacguucggaaugacagcgauaaauggaaguuucuugagauguuccgcggguccucucagaacgacuuuuauaauagacggacccugacgagcgauacccgccucgugggaauccugaaauacggcggcagagucuggacauuccauggggaaaccccucgggcgacaaccgacuccagcaacacggcuaaucuugauggaaucucuauuacaauccacuccgaguuuuauauuaucccccgcagccaagagucuaagugcaacgaauacauuaauaacggccugugaggacuaguuauaagacugacuagcccgaugggccucccaacgggcccuccuccccuccuugcaccgagauuaaucaaaggcucuuuucagagccaccaaaaaaaaaaaaaaaaaaaaaaaaaaaaaaaaaaaaaaaaaaaaaaaaaaaaaaaaaaaaaaaaaaaaaaaaaaaaaaaaaaaaaaaaaaaaaaaaaaaaa

SEQ ID NO: 1672 - RNA, 756 nt, Artificial Sequence
  mRNA product Design i-3 (hSL-A100) comprising derived and/or modified sequence from RVA/Wa-VirWa/P[8]__ACR22783.1__P2_VP8*(65-223) (opt5)
aggagaaagcuuaccaugcaguacaucaaggccaacagcaaauucauuggcaucaccgagcugggguccggaucuggccucgacgggcccuaucaaccuacaacguuuaccccgcccaaugauuacuggauucugaucaacagcaauacaaacggaguggucuaugaauccaccaauaacucugacuucuggacagcuguuguggccauugagccucacgugaaucccgucgauagacaguacaccaucuuuggcgaaagcaagcaguucaacgugcggaaugacuccaacaaauggaaguuucuugagauguuccgcucuagcucccagaaugaauuuuauaacagacggacacugaccagcgauacgcgccucguugggauccugaaauacggaggcagaguguggaccuuccauggcgagacaccucgggcgaccacagacucuuccagcaccgcuaaucuuaacaauauuucuaucacgauucacuccgaguuuuauaucauuccccgcagccaagaaucuaagugcaacgaguacaucaacaaugggcugugaggacuaguuauaagacugacuagcccgaugggccucccaacgggcccuccuccccuccuugcaccgagauuaaucaaaggcucuuuucagagccaccaaaaaaaaaaaaaaaaaaaaaaaaaaaaaaaaaaaaaaaaaaaaaaaaaaaaaaaaaaaaaaaaaaaaaaaaaaaaaaaaaaaaaaaaaaaaaaaaaaaaa

SEQ ID NO: 1673 - RNA, 756 nt, Artificial Sequence
  mRNA product Design i-3 (hSL-A100) comprising derived and/or modified sequence from RVA/Wa/P[8]__AAA47290.1__P2_VP8*(65-223) (opt5)
aggagaaagcuuaccaugcaguacaucaaggccaacagcaaauucauuggcaucaccgagcugggguccggaucuggccucgacgggcccuaucaaccuacaacguuuaccccgcccaaugauuacuggauucugaucaacagcaauacaaacggaguggucuaugaauccaccaauaacucugacuucuggacagcuguuguggccauugagccucacgugaaucccgucgauagacaguacaccaucuuuggcgaaagcaagcaguucaacguguccaaugacucuaacaaauggaaguuucuugagauguuccggagcuccagccagaaugaauuuuauaaccgcagaacacugaccucugauacgcgguucguugggauccucaaauacggaggccgcguguggaccuuucauggcgagacaccuagagcgaccacagacuccagcucuaccgcuaaucugaacaauauuuccaucacgauucacagcgaguucuauaucauuccccggucucaagaauccaagugcaacgaguacaucaacaaugggcuuugaggacuaguuauaagacugacuagcccgaugggccucccaacgggcccuccuccccuccuugcaccgagauuaaucaaaggcucuuuucagagccaccaaaaaaaaaaaaaaaaaaaaaaaaaaaaaaaaaaaaaaaaaaaaaaaaaaaaaaaaaaaaaaaaaaaaaaaaaaaaaaaaaaaaaaaaaaaaaaaaaaaaa

SEQ ID NO: 1674 - RNA, 756 nt, Artificial Sequence; identical to SEQ ID NO: 1673
  mRNA product Design i-3 (hSL-A100) comprising derived and/or modified sequence from RVA/Wa/P[8]__AAA66953.1__P2_VP8*(65-223) (opt5)

SEQ ID NO: 1675 - RNA, 828 nt, Artificial Sequence
  mRNA product Design i-3 (hSL-A100) comprising derived and/or modified sequence from RVA/BE1058/P[4]__AEX30665.1__P2_VP8*(41-223) (opt5)
aggagaaagcuuaccaugcaguacaucaaggccaacagcaaauucauuggcaucaccgagcugggguccggaucuggcgcucaaacaagauaugcccccgugaauugggggcacggagaaauuaacgacagcacgaccgucgagccuguucucgauggcccguaccagcccacaaccuuuaagccucccaaugacuauuggcugcuuaucuccucuaacacagauggggugguguacgaaagcaccaauaacuccgacuucuggacagcggucauugcuguggagccucauguuaaucagaccaaccggcaguaugugcuguuuggagaaaauaaacaauucaacaucgaaaauucuagcgauaaguggaaauuuuucgagauguuuaagggcaacucccagagcgacuucucuaaucgcagaacgcucaccuccagcaaccggcuggucggcaugcuuaaguacgggggacgcguguggacauuucacggcgagacccccagagccacaaccgauucuuccagcacggccgaccugaauaacaucucuauuaucauucauuccgaguucuauaucauuccucggagccaggaauccaaaugcaacgaguacaucaauaacgggcucugaggacuaguuauaagacugacuagcccgaugggccucccaacgggcccuccuccccuccuugcaccgagauuaaucaaaggcucuuuucagagccaccaaaaaaaaaaaaaaaaaaaaaaaaaaaaaaaaaaaaaaaaaaaaaaaaaaaaaaaaaaaaaaaaaaaaaaaaaaaaaaaaaaaaaaaaaaaaaaaaaaaaa

SEQ ID NO: 1676 - RNA, 828 nt, Artificial Sequence
  mRNA product Design i-3 (hSL-A100) comprising derived and/or modified sequence from RVA/DS-1/P[4]__CAD62680.1__P2_VP8*(41-223) (opt5)
aggagaaagcuuaccaugcaguacaucaaggccaacagcaaauucauuggcaucaccgagcugggguccggaucuggcgcucaaacaagauaugcccccgugaauugggggagcugggaaauuaacgacuccacgaccgucgagccuguucucgauggaccguaccagcccacaaccuuuaagccucccaaugacuauuggcugcuuaucucuagcaacacaaauggcgugguguacgaauccaccaacaauaacgauuucuggacagcggucucuagcguggagccucacguuucccagaccaaucggcaguauauucuguuuggggaaaacaaacaauucaauguggagaacaauagcgacaaguggaaauuuuucgagacguuuaccggaucuucccagggcaacuucagcaaucgcagaacacucaccucuuccaaccggcuggucggcaugcuuaaguacgggggacgcguguggacauuucauggcgaaacccccagagcuacgacagauagcucuaacaccgccgaccugaauaacaucuccaucauuauccacagcgaguucuauauuaucccucggucccaggaaucuaagugcaaugaguacauuaacaaugggcucugaggacuaguuauaagacugacuagcccgaugggccucccaacgggcccuccuccccuccuugcaccgagauuaaucaaaggcucuuuucagagccaccaaaaaaaaaaaaaaaaaaaaaaaaaaaaaaaaaaaaaaaaaaaaaaaaaaaaaaaaaaaaaaaaaaaaaaaaaaaaaaaaaaaaaaaaaaaaaaaaaaaaa

SEQ ID NO: 1677 - RNA, 828 nt, Artificial Sequence; identical to SEQ ID NO: 1676
  mRNA product Design i-3 (hSL-A100) comprising derived and/or modified sequence from RVA/DS-1/P[4]__ABV53252.1__P2_VP8*(41-223) (opt5)

SEQ ID NO: 1678 - RNA, 828 nt, Artificial Sequence
  mRNA product Design i-3 (hSL-A100) comprising derived and/or modified sequence from RVA/F01322/P[6]__AFA51886.1__P2_VP8*(41-223) (opt5)
aggagaaagcuuaccaugcaguacaucaaggccaacagcaaauucauuggcaucaccgagcugggguccggaucuggcgcucaaacaaauuaugcccccgugacguggagccacggggaagucaacgacuccaccacaauugagccuguucucgauggaccguaccagcccaccaauuuuaagccucccaacgacuauuggauccugcuuaauccuacaaaccaacagguggugcuggaaggcaccaauaaaacagauauuugggucgcgcuccugcuuguggagcccaacguuaccaaucagucuagacaguacacgcuguucggggaaaccaagcagaucacaguggagaacaauaccaacaaauggaaguuuuucgagauguuucggagcuccgucucugcugaguuccagcauaagcgcacacucaccagcgacacgaaacuggccggauuuaugaaguucuauaauuccguguggacauuucacggcgaaaccccuaacgccacaaccgauuacagcucuaccuccaaucuguucgaaguugagacagugauccaugucgaguuuuauauuaucccgagaagccaagaaucuaaaugcuccgaguacauuaacacgggccucugaggacuaguuauaagacugacuagcccgaugggccucccaacgggcccuccuccccuccuugcaccgagauuaaucaaaggcucuuuucagagccaccaaaaaaaaaaaaaaaaaaaaaaaaaaaaaaaaaaaaaaaaaaaaaaaaaaaaaaaaaaaaaaaaaaaaaaaaaaaaaaaaaaaaaaaaaaaaaaaaaaaaa

SEQ ID NO: 1679 - RNA, 828 nt, Artificial Sequence
  mRNA product Design i-3 (hSL-A100) comprising derived and/or modified sequence from RVA/1076/P[6]__AAA47337.1__P2_VP8*(41-223) (opt5)
aggagaaagcuuaccaugcaguacaucaaggccaacagcaaauucauuggcaucaccgagcugggguccggaucuggcgcucaaacaaauuaugcccccgugacguggagccacggggaagucaacgacuccaccacaauugagccuguucucgauggaccguaccagcccaccucuuuuaagccucccagcgacuauuggauccugcuuaauccuacaaaccaacagguggugcuggaaggcaccaauaaaacagauauuugggucgcgcuccugcuuguggagcccaacguuaccaaucaguccagacaguacacgcuguucggggaaaccaagcagaucacaguggagaacaauaccaacaaauggaaguuuuucgagauguuucggucuagcgucuccgcugaguuccagcauaagcgcacacucaccagcgacacgaaacuggccggauuucugaaguucuauaauucuguguggacauuuuacggcgaaaccccucacgccacaaccgauuauuccagcaccucuaaccucuccgaaguugagacagcuauccauguggaguucuacauuaucccgagaagccaagaaucuaaaugcaaugaguacauuaacacgggccugugaggacuaguuauaagacugacuagcccgaugggccucccaacgggcccuccuccccuccuugcaccgagauuaaucaaaggcucuuuucagagccaccaaaaaaaaaaaaaaaaaaaaaaaaaaaaaaaaaaaaaaaaaaaaaaaaaaaaaaaaaaaaaaaaaaaaaaaaaaaaaaaaaaaaaaaaaaaaaaaaaaaaa

SEQ ID NO: 1680 - RNA, 828 nt, Artificial Sequence
  mRNA product Design i-3 (hSL-A100) comprising derived and/or modified sequence from RVA/BE1128/P[8]__AEX30671.1__P2_VP8*(41-223) (opt5)
aggagaaagcuuaccaugcaguacaucaaggccaacagcaaauucauuggcaucaccgagcugggguccggaucuggcgcucaaacaagauaugcccccgugaauugggggcacggagaaauuaacgacagcacgaccgucgagccuauccucgauggcccguaccagcccacaaccuuuacaccucccaccgacuauuggauucugaucacauccaauaccaacgggguuguguacgaaucuacgaauaacagcgauuucuggaccgcggugaucgcugucgagccucaugugaaucccguugaccggcaguauaacguguuuggagaaaauaagcaguucaacguccgcaaugauuccgacaaauggaaguuucuugagauguucagaggcucuagccaaaacgauuuuuacaaucggcgcacacugaccuccgacacaagacucgugggcauucugaaauaugggggacggguuuggaccuuccacggcgagacgccucgcgccacaaccgauagcucuaacacagccaaucuugacgggaucuccauuaccauccauagcgaauuuuacauuaucccgagaucucaggaguccaagugcaacgaauacauuaacaauggacugugaggacuaguuauaagacugacuagcccgaugggccucccaacgggcccuccuccccuccuugcaccgagauuaaucaaaggcucuuuucagagccaccaaaaaaaaaaaaaaaaaaaaaaaaaaaaaaaaaaaaaaaaaaaaaaaaaaaaaaaaaaaaaaaaaaaaaaaaaaaaaaaaaaaaaaaaaaaaaaaaaaaaa

SEQ ID NO: 1681 - RNA, 828 nt, Artificial Sequence
  mRNA product Design i-3 (hSL-A100) comprising derived and/or modified sequence from RVA/Wa-VirWa/P[8]__ACR22783.1__P2_VP8*(41-223) (opt5)
aggagaaagcuuaccaugcaguacaucaaggccaacagcaaauucauuggcaucaccgagcugggguccggaucuggcgcucaaacaagauaugcccccgugaauugggggcacggagaaauuaacgacagcacgaccgucgagccuauccucgauggcccguaccagcccacaaccuuuacaccucccaaugacuauuggauucugaucaacuccaauaccaacgggguuguguacgaaucuacaaauaacagcgauuucuggaccgcgguggucgcuaucgagccucaugugaaucccguugaccggcaguauacgauuuuuggagaauccaagcaguucaacgugcgcaaugauucuaacaaauggaaguuucuugagauguucagaagcuccagccaaaaugaguuuuacaaccggcgcacccugacaucugacaccagacucgucggcauccugaaauauggcgggcggguguggacauuccacggagaaaccccucgcgccacgacagauuccagcucuaccgccaaucuuaacaacauuuccaucacaauucauagcgaguuuuacaucauuccgagaucucaggaauccaagugcaaugaguacaucaacaauggccugugaggacuaguuauaagacugacuagcccgaugggccucccaacgggcccuccuccccuccuugcaccgagauuaaucaaaggcucuuuucagagccaccaaaaaaaaaaaaaaaaaaaaaaaaaaaaaaaaaaaaaaaaaaaaaaaaaaaaaaaaaaaaaaaaaaaaaaaaaaaaaaaaaaaaaaaaaaaaaaaaaaaaa

SEQ ID NO: 1682 - RNA, 828 nt, Artificial Sequence
  mRNA product Design i-3 (hSL-A100) comprising derived and/or modified sequence from RVA/Wa/P[8]__AAA47290.1__P2_VP8*(41-223) (opt5)
aggagaaagcuuaccaugcaguacaucaaggccaacagcaaauucauuggcaucaccgagcugggguccggaucuggcgcucaaacaagauaugcccccgugaauugggggcacggagaaauuaacgacagcacgaccgucgagccuauccucgauggcccguaccagcccacaaccuuuacaccucccaaugacuauuggauucugaucaacuccaauaccaacgggguuguguacgaaucuacaaauaacagcgauuucuggaccgcgguggucgcuaucgagccucaugugaaucccguugaccggcaguauacgauuuuuggagaauccaagcaguucaacgugucuaaugauagcaacaaauggaaguuucuugagauguuccgcuccagcucucaaaaugaguuuuacaacagacggacccugacauccgacacccgcuucgucggcauccucaaauauggcgggagaguguggacauuucacggagaaaccccucgggccacgacagauucuagcuccaccgccaaucugaacaacauuagcaucacaauucauucugaguucuacaucauuccgcgcucccaggaaagcaagugcaaugaguacaucaacaauggccuuugaggacuaguuauaagacugacuagcccgaugggccucccaacgggcccuccuccccuccuugcaccgagauuaaucaaaggcucuuuucagagccaccaaaaaaaaaaaaaaaaaaaaaaaaaaaaaaaaaaaaaaaaaaaaaaaaaaaaaaaaaaaaaaaaaaaaaaaaaaaaaaaaaaaaaaaaaaaaaaaaaaaaa

SEQ ID NO: 1683 - RNA, 828 nt, Artificial Sequence
  mRNA product Design i-3 (hSL-A100) comprising derived and/or modified sequence from RVA/Wa/P[8]__AAA66953.1__P2_VP8*(41-223) (opt5)
aggagaaagcuuaccaugcaguacaucaaggccaacagcaaauucauuggcaucaccgagcugggguccggaucuggcgcucaaacaagauaugcccccgugaauugggggcacggagaaauuaacgacagcacgaccgucgagccuaugcucgauggcccguaccagcccacaaccuuuacaccucccaaugacuauuggauccugauuaacuccaauaccaacgggguuguguacgaaucuacaaauaacagcgauuucuggaccgcgguggucgcuaucgagccucaugugaaucccguugaccggcaguauacgaucuuuggagaauccaagcaguucaacgugucuaaugauagcaacaaauggaaguuucuugagauguuccgcuccagcucucaaaaugaguuuuacaacagacggacccugacauccgacacccgcuucgucggcauucucaaauauggcgggagaguguggacauuucacggagaaaccccucgggccacgacagauucuagcuccaccgccaaucugaacaacaucagcauuacaauccauucugaguucuacauuaucccgcgcucccaggaaagcaagugcaaugaguacauuaacaauggccuuugaggacuaguuauaagacugacuagcccgaugggccucccaacgggcccuccuccccuccuugcaccgagauuaaucaaaggcucuuuucagagccaccaaaaaaaaaaaaaaaaaaaaaaaaaaaaaaaaaaaaaaaaaaaaaaaaaaaaaaaaaaaaaaaaaaaaaaaaaaaaaaaaaaaaaaaaaaaaaaaaaaaaa

SEQ ID NO: 1684 - RNA, 1254 nt, Artificial Sequence
  mRNA product Design i-3 (hSL-A100) comprising derived and/or modified sequence from RVA/BE1058/P[4]__AEX30665.1__P2_VP8*(65-223)_Ferritin (opt5)
aggagaaagcuuaccaugcaguacaucaaggccaacagcaaauucauuggcaucaccgagcugggguccggaucuggccucgacgggcccuaucaaccuacaacguuuaagccgcccaaugauuacuggcugcuuauuagcuccaacaccgacggaguggucuaugaaucuacaaauaacagcgauuucuggaccgcuguuaucgccguggagccucacgugaaucagacaaacagacaguacguccuguuuggcgaaaauaaacaguucaacauugagaauagcucugacaaguggaaauuuuucgaaauguuuaaggggaacagccaauccgauuucagcaaucggcgcacccucacaucuuccaacagacuggugggaaugcuuaaguauggcggccggguuuggaccuuucauggggagacgccccgcgcgaccacagacuccucuuccaccgcugaucugaauaacaucagcaucauuauccacucugaguucuacauuaucccuagaucccaggaaagcaaaugcaaugaguauauuaacaacggacucuccggcggggacaucauuaagcugcugaaugaacaggugaacaaagagaugcagucuagcaaucucuacauguccaugagcucuugguguuacacacauucccuggauggagccggccuuuuucuguucgaccacgccgcugaggaauaugagcaugccaagaaacucaucaucuuucugaacgaaaauaacguccccgugcaacuuaccagcauuucugcuccugagcacaaguucgaagggcugacgcagaucuuccagaaggccuacgagcacgagcagcauauuagcgaauccaucaauaacauuguugaucacgcgaucaaaucuaaggaccaugccacauuuaauuuccuccaaugguauguggcugagcagcacgaagaggaaguccuguuuaaagauauccuggacaagauugagcucaucggaaacgagaaucacggccuguaccuugccgaccaguaugugaaaggcauugcuaagagccggaaauccugaggacuaguuauaagacugacuagcccgaugggccucccaacgggcccuccuccccuccuugcaccgagauuaaucaaaggcucuuuucagagccaccaaaaaaaaaaaaaaaaaaaaaaaaaaaaaaaaaaaaaaaaaaaaaaaaaaaaaaaaaaaaaaaaaaaaaaaaaaaaaaaaaaaaaaaaaaaaaaaaaaaaa

SEQ ID NO: 1685 - RNA, 1254 nt, Artificial Sequence
  mRNA product Design i-3 (hSL-A100) comprising derived and/or modified sequence from RVA/DS-1/P[4]__CAD62680.1__P2_VP8*(65-223)_Ferritin (opt5)
aggagaaagcuuaccaugcaguacaucaaggccaacagcaaauucauuggcaucaccgagcugggguccggaucuggccucgacgggcccuaucaaccuacaacguuuaagccgcccaaugauuacuggcugcuuauuagcuccaacaccaauggaguggucuaugaaucuacaaacaauaacgacuucuggaccgcuguuagcuccguggagccucacgugucucagacaaauagacaguacauccuguuuggcgaaaacaaacaguucaaugucgagaacaauagcgauaaguggaaauuuuucgaaaccuuuacaggguccagccaaggaaacuucucuaaucggcgcacccucacguccagcaacagacuggugggcaugcuuaaguauggcgggcggguuuggaccuuucauggagagacaccccgcgccaccacagacucuuccaauaccgcggaucugaacaacauuagcaucaucauucacucugaguucuacaucauuccuagaucccaggaaagcaagugcaaugaguauaucaacaauggccucuccgggggagacauuaucaaacugcugaacgaacaggugaauaaggagaugcagucuagcaaccucuacauguccaugagcucuugguguuacacgcauucccuggauggcgcugggcuuuuucuguucgaccacgccgccgaggaauaugagcaugcuaaaaagcucauuaucuuucugaaugaaaacaauguccccgugcaacuuacaagcaucucugccccugagcacaaauucgaaggacugacccagauuuuccagaaggcuuacgagcacgagcagcauaucagcgaauccauuaacaauaucguugaucacgccauuaagucuaaagaccaugcgacauuuaacuuccuccaaugguauguggccgagcagcacgaagaggaaguccuguuuaaggauauccuggacaaaaucgagcucauuggcaaugagaaccacggccuguaccuugcugaucaguaugugaaggggaucgccaaaagccggaaguccugaggacuaguuauaagacugacuagcccgaugggccucccaacgggcccuccuccccuccuugcaccgagauuaaucaaaggcucuuuucagagccaccaaaaaaaaaaaaaaaaaaaaaaaaaaaaaaaaaaaaaaaaaaaaaaaaaaaaaaaaaaaaaaaaaaaaaaaaaaaaaaaaaaaaaaaaaaaaaaaaaaaaa

SEQ ID NO: 1686 - RNA, 1254 nt, Artificial Sequence; identical to SEQ ID NO: 1685
  mRNA product Design i-3 (hSL-A100) comprising derived and/or modified sequence from RVA/DS-1/P[4]__ABV53252.1__P2_VP8*(65-223)_Ferritin (opt5)

SEQ ID NO: 1687 - RNA, 1254 nt, Artificial Sequence
  mRNA product Design i-3 (hSL-A100) comprising derived and/or modified sequence from RVA/F01322/P[6]__AFA51886.1__P2_VP8*(65-223)_Ferritin (opt5)
aggagaaagcuuaccaugcaguacaucaaggccaacagcaaauucauuggcaucaccgagcugggguccggaucuggccucgacgggcccuaucaaccuacaaauuuuaagccgcccaacgauuacuggauucugcuuaauccuacgaaccaacaggugguccuggaaggaaccaauaaaacagacaucuggguugcucuccugcuuguggagcccaacgugaccaaucagagccggcaguauacacuguucggcgaaaccaagcagauuacagucgagaacaauaccaacaaauggaaguuuuucgaaauguuucgguccucugugagcgccgaguuccagcacaagcgcacgcucaccuccgauacaaaacuggcgggguuuaugaaguucuacaauucuguuuggaccuuucauggagagacaccuaacgcuaccacggacuauagcuccacaagcaaucuguucgaaguggagaccgucauccacguggaauuuuacaucauucccagaucucaggaguccaaaugcagcgaguauaucaacacaggccucucuggcggggauauuaucaagcugcuuaaugaacaaguuaacaaagagaugcaguccagcaaccuguacaugucuauguccagcugguguuacacccauucccucgacggagccggccuguuccuuuuugaucacgccgcugaagaguaugaacaugccaagaagcugauuaucuuccucaaugagaacaaugugccuguccagcugaccucuauuagcgcuccggagcacaaauucgaagggcugacacagaucuuucaaaaggccuacgagcacgaacagcauaucuccgagagcauuaacaauaucguggaccacgcgauuaaaucuaaggaucaugccacguucaacuuucuccagugguauguggcugaacaacacgaggaggaaguccuguucaaagacauccuugauaagauugagcugaucggaaaugaaaaccacggccucuaccuggccgaccaguauguuaaagggaucgcuaaguccagaaagagcugaggacuaguuauaagacugacuagcccgaugggccucccaacgggcccuccuccccuccuugcaccgagauuaaucaaaggcucuuuucagagccaccaaaaaaaaaaaaaaaaaaaaaaaaaaaaaaaaaaaaaaaaaaaaaaaaaaaaaaaaaaaaaaaaaaaaaaaaaaaaaaaaaaaaaaaaaaaaaaaaaaaaa

SEQ ID NO: 1688 - RNA, 1254 nt, Artificial Sequence
  mRNA product Design i-3 (hSL-A100) comprising derived and/or modified sequence from RVA/1076/P[6]__AAA47337.1__P2_VP8*(65-223)_Ferritin (opt5)
aggagaaagcuuaccaugcaguacaucaaggccaacagcaaauucauuggcaucaccgagcugggguccggaucuggccucgacgggcccuaucaaccuacgagcuuuaagccgcccuccgauuacuggauucugcuuaauccuacaaaccaacaggugguccuggaaggaaccaauaaaacagacaucuggguugcucuccugcuuguggagcccaacgugaccaaucagucucggcaguauacacuguucggcgaaaccaagcagauuacagucgagaacaauaccaacaaauggaaguuuuucgaaauguuucggagcuccgugucugccgaguuccagcacaagcgcacgcucaccagcgauacaaaacuggcgggguuucugaaguucuacaauuccguuuggaccuuuuauggagagacaccucaugcuaccacggacuacagcucuacauccaaccucagcgaaguggagaccgccauccacgucgaguucuauaucauucccagaucucaggaauccaaaugcaaugaguacaucaacacaggccugagcggcggggauauuaucaaacuucugaaugaacaagugaacaaggagaugcagucuuccaaucucuacaugagcauguccucuugguguuauacccauagccuggacggagccggccuuuuucuguucgaucacgcugccgaagaguacgaacaugcuaagaagcucauuaucuuucugaacgagaacaauguuccugugcagcugaccuccauuagcgccccggagcacaaauucgaagggcucacacagaucuuccaaaaggcguaugagcacgaacagcauaucucugaguccauuaacaauaucgucgaccacgccauuaaaagcaaggaucaugcuacguuuaacuuccugcagugguacguggccgaacaacacgaggaggaagugcuuuuuaaagacauccuggauaagauugagcucaucggaaaugaaaaccacggccuguaucuugcugaccaguacgucaaagggaucgccaagucuagaaagagcugaggacuaguuauaagacugacuagcccgaugggccucccaacgggcccuccuccccuccuugcaccgagauuaaucaaaggcucuuuucagagccaccaaaaaaaaaaaaaaaaaaaaaaaaaaaaaaaaaaaaaaaaaaaaaaaaaaaaaaaaaaaaaaaaaaaaaaaaaaaaaaaaaaaaaaaaaaaaaaaaaaaaa

SEQ ID NO: 1689 - RNA, 1254 nt, Artificial Sequence
  mRNA product Design i-3 (hSL-A100) comprising derived and/or modified sequence from RVA/BE1128/P[8]__AEX30671.1__P2_VP8*(65-223)_Ferritin (opt5)
aggagaaagcuuaccaugcaguacaucaaggccaacagcaaauucauuggcaucaccgagcugggguccggaucuggccucgacgggcccuaucaaccuacaacguuuaccccgcccacagauuacuggauucugaucaccagcaauacaaacggaguggucuaugaauccaccaauaacucugacuucuggacagcuguuauugccguggagccucacgugaaucccgucgauagacaguacaacguguuuggcgaaaauaagcaguucaacguucggaaugacagcgauaaauggaaguuucuugagauguuccgcggguccucucagaacgacuuuuauaauagacggacccugacgagcgauacccgccucgugggaauccugaaauacggcggcagagucuggacauuccauggggaaaccccucgggcgacaaccgacuccagcaacacggcuaaucuugauggaaucucuauuacaauccacuccgaguuuuauauuaucccccgcagccaagagucuaagugcaacgaauacauuaauaacggccuguccgggggagacaucauuaagcuccugaacgaacaggugaauaaagagaugcagagcucuaaccuguacauguccaugagcuccugguguuauacccauucucucgauggcgccgggcuguuccuuuuugaccacgccgcugaggaguacgaacaugccaagaaacugaucaucuuccucaaugagaacaauguuccugugcagcugacaagcauuuccgcuccggaacacaaguuugagggacuuacccaaaucuuccagaaagccuaugaacacgagcagcauauuagcgagucuaucaacaauauugucgaucacgcgaucaaguccaaggaccaugccaccuucaacuuucugcagugguacguggcugaacaacacgaggaagagguccucuucaaagacauccuggauaagauugaacugaucggcaaugagaaccacggccucuaucuggccgaccaguacgugaaagggauugcuaagagcagaaaaucuugaggacuaguuauaagacugacuagcccgaugggccucccaacgggcccuccuccccuccuugcaccgagauuaaucaaaggcucuuuucagagccaccaaaaaaaaaaaaaaaaaaaaaaaaaaaaaaaaaaaaaaaaaaaaaaaaaaaaaaaaaaaaaaaaaaaaaaaaaaaaaaaaaaaaaaaaaaaaaaaaaaaaa

SEQ ID NO: 1690 - RNA, 1254 nt, Artificial Sequence
  mRNA product Design i-3 (hSL-A100) comprising derived and/or modified sequence from RVA/Wa-VirWa/P[8]__ACR22783.1__P2_VP8*(65-223)_Ferritin (opt5)
aggagaaagcuuaccaugcaguacaucaaggccaacagcaaauucauuggcaucaccgagcugggguccggaucuggccucgacgggcccuaucaaccuacaacguuuaccccgcccaaugauuacuggauucugaucaacagcaauacaaacggagugguguaugaauccaccaauaacucugacuucuggacagcuguuguggccauugagccucacgugaaucccgucgauagacaguacaccaucuuuggcgaaagcaagcaguucaacgugcggaaugacuccaacaaauggaaguuucuugagauguuccgcucuagcucccagaaugaauuuuauaacagacggacacugaccagcgauacgcgccucguugggauccugaaauacggaggcagaguguggaccuuccauggcgagacaccucgggcgaccacagacucuuccagcaccgcuaaucuuaacaauauuucuaucacgauucacuccgaguuuuauaucauuccccgcagccaagaaucuaagugcaacgaguacaucaacaaugggcuguccggaggcgauauuaucaagcuccugaacgaacaggucaauaaagagaugcagagcuccaaccuguacaugucuaugagcuccugguguuauacacauagccucgacggggccggacuguuccuuuuugaucacgccgcugaggaauacgagcaugccaagaaacugaucauuuuccucaaugaaaacaaugugccuguucagcugaccucuaucuccgcuccggagcacaaguuugaaggccuuacacaaauuuuccagaaagccuaugagcacgagcagcauaucagcgaaucuauuaacaauaucguggaccacgcgaucaagagcaaggaucaugccaccuucaacuuucugcagugguacgucgcugagcaacacgaagaggaaguccucuucaaagacauucuggauaagaucgagcugauugggaaugagaaccacggacucuaucuggccgaccaguacgugaaaggcaucgcuaaguccagaaaaucuugaggacuaguuauaagacugacuagcccgaugggccucccaacgggcccuccuccccuccuugcaccgagauuaaucaaaggcucuuuucagagccaccaaaaaaaaaaaaaaaaaaaaaaaaaaaaaaaaaaaaaaaaaaaaaaaaaaaaaaaaaaaaaaaaaaaaaaaaaaaaaaaaaaaaaaaaaaaaaaaaaaaaa

SEQ ID NO: 1691 - RNA, 1254 nt, Artificial Sequence
  mRNA product Design i-3 (hSL-A100) comprising derived and/or modified sequence from RVA/Wa/P[8]__AAA47290.1__P2_VP8*(65-223)_Ferritin (opt5)
aggagaaagcuuaccaugcaguacaucaaggccaacagcaaauucauuggcaucaccgagcugggguccggaucuggccucgacgggcccuaucaaccuacaacguuuaccccgcccaaugauuacuggauucugaucaacagcaauacaaacggaguggucuaugaauccaccaauaacucugacuucuggacagcuguuguggccauugagccucacgugaaucccgucgauagacaguacaccaucuuuggcgaaagcaagcaguucaacguguccaaugacucuaacaaauggaaguuucuugagauguuccggagcuccagccagaaugaauuuuauaaccgcagaacacugaccucugauacgcgguucguugggauccucaaauacggaggccgcguguggaccuuucauggcgagacaccuagagcgaccacagacuccagcucuaccgcuaaucugaacaauauuuccaucacgauucacagcgaguucuauaucauuccccggucucaagaauccaagugcaacgaguacaucaacaaugggcuuagcggaggcgauauuaucaagcugcucaacgaacaggucaauaaagagaugcaguccucuaaccuguacaugagcauguccagcugguguuauacacauucucuggacggggccggacucuuucuguucgaucacgccgcugaggaauacgagcaugccaagaaacuuaucauuuuucugaaugaaaacaaugugccuguucagcucaccuccaucagcgcuccggagcacaaguucgaaggccugacacaaauuuuccagaaagccuaugagcacgagcagcauaucucugaaagcauuaacaauaucguggaccacgcgaucaaguccaaggaucaugccaccuuuaacuuccuucagugguacgucgcugagcaacacgaagaggaagugcuguuuaaagacauucucgauaagaucgagcugauugggaaugagaaccacggacuguaucucgccgaccaguacgugaaaggcaucgcuaagucucgcaaaagcugaggacuaguuauaagacugacuagcccgaugggccucccaacgggcccuccuccccuccuugcaccgagauuaaucaaaggcucuuuucagagccaccaaaaaaaaaaaaaaaaaaaaaaaaaaaaaaaaaaaaaaaaaaaaaaaaaaaaaaaaaaaaaaaaaaaaaaaaaaaaaaaaaaaaaaaaaaaaaaaaaaaaa

SEQ ID NO: 1692 - RNA, 1254 nt, Artificial Sequence; identical to SEQ ID NO: 1691
  mRNA product Design i-3 (hSL-A100) comprising derived and/or modified sequence from RVA/Wa/P[8]__AAA66953.1__P2_VP8*(65-223)_Ferritin (opt5)

SEQ ID NO: 1693 - RNA, 1326 nt, Artificial Sequence
  mRNA product Design i-3 (hSL-A100) comprising derived and/or modified sequence from RVA/BE1058/P[4]__AEX30665.1__P2_VP8*(41-223)_Ferritin (opt5)
aggagaaagcuuaccaugcaguacaucaaggccaacagcaaauucauuggcaucaccgagcugggguccggaucuggcgcucaaacaagauaugcccccgugaauugggggcacggagaaauuaacgacagcacgaccgucgagccuguucucgauggcccguaccagcccacaaccuuuaagccucccaaugacuauuggcugcuuaucuccucuaacacagauggggugguguacgaaagcaccaauaacuccgacuucuggacagcggucauugcuguggagccucauguuaaucagaccaaccggcaguaugugcuguuuggagaaaauaaacaauucaacaucgaaaauucuagcgauaaguggaaauuuuucgagauguuuaagggcaacucccagagcgacuucucuaaucgcagaacgcucaccuccagcaaccggcuggucggcaugcuuaaguacgggggacgcguguggacauuucacggcgagacccccagagccacaaccgauucuuccagcacggccgaccugaauaacaucucuauuaucauucauuccgaguucuauaucauuccucggagccaggaauccaaaugcaacgaguacaucaauaacgggcucucuggaggcgauauuaucaagcugcugaaugagcagguuaacaaagaaaugcaaagcuccaaucucuacaugagcaugucuuccugguguuauacacacagccuggacggggcuggacuuuuucuguucgaucaugccgcugaggaauacgagcacgccaagaaacucaucauuuuucugaacgaaaauaacgugccgguccagcuuaccucuaucagcgcgcccgagcacaaguucgagggccugacacagauuuuccagaaggccuaugaacaugagcaacacaucuccgaaucuauuaauaacaucguggaccaugcuaucaaaagcaaggaucacgccaccuuuaauuuccuccagugguacguggcugagcagcacgaagaggagguccuguuuaaagacauucuggacaagaucgaacucauuggcaacgagaaucaugggcuguaucuugccgaucaauacguuaaaggaaucgcgaagucccgcaaaagcugaggacuaguuauaagacugacuagcccgaugggccucccaacgggcccuccuccccuccuugcaccgagauuaaucaaaggcucuuuucagagccaccaaaaaaaaaaaaaaaaaaaaaaaaaaaaaaaaaaaaaaaaaaaaaaaaaaaaaaaaaaaaaaaaaaaaaaaaaaaaaaaaaaaaaaaaaaaaaaaaaaaaa

SEQ ID NO: 1694 - RNA, 1326 nt, Artificial Sequence
  mRNA product Design i-3 (hSL-A100) comprising derived and/or modified sequence from RVA/DS-1/P[4]__CAD62680.1__P2_VP8*(41-223)_Ferritin (opt5)
aggagaaagcuuaccaugcaguacaucaaggccaacagcaaauucauuggcaucaccgagcugggguccggaucuggcgcucaaacaagauaugcccccgugaauugggggagcugggaaauuaacgacuccacgaccgucgagccuguucucgauggaccguaccagcccacaaccuuuaagccucccaaugacuauuggcugcuuaucucuagcaacacaaauggcgugguguacgaauccaccaacaauaacgauuucuggacagcggucucuagcguggagccucacguuucccagaccaaucggcaguauauucuguuuggggaaaacaaacaauucaauguggagaacaauagcgacaaguggaaauuuuucgagacguuuaccggaucuucccagggcaacuucagcaaucgcagaacacucaccucuuccaaccggcuggucggcaugcuuaaguacgggggacgcguguggacauuucauggcgaaacccccagagcuacgacagauagcucuaacaccgccgaccugaauaacaucuccaucauuauccacagcgaguucuauauuaucccucggucccaggaaucuaagugcaaugaguacauuaacaaugggcucagcggaggcgauaucauuaaacugcugaacgagcagguuaauaaggaaaugcaauccagcaaccucuacaugucuauguccagcugguguuauacacauucucuggacggggccggacuuuuucuguucgaucacgcugccgaggaauacgagcaugcuaaaaagcucaucaucuuucugaaugaaaacaaugugccgguccagcuuaccagcauuuccgcccccgagcacaaauucgagggccugacccagaucuuccagaaggcguaugaacacgagcaacauauuucugaaagcaucaacaauauuguggaccacgccaucaaguccaaagaucaugcuacauuuaacuuccuccagugguacguggccgagcagcacgaagaggagguccuguuuaaggacauccuggauaaaauugaacucaucggcaaugagaaccacgggcuguaucuugcugaccaauacguuaagggaauugccaaaagccgcaagucuugaggacuaguuauaagacugacuagcccgaugggccucccaacgggcccuccuccccuccuugcaccgagauuaaucaaaggcucuuuucagagccaccaaaaaaaaaaaaaaaaaaaaaaaaaaaaaaaaaaaaaaaaaaaaaaaaaaaaaaaaaaaaaaaaaaaaaaaaaaaaaaaaaaaaaaaaaaaaaaaaaaaaa

SEQ ID NO: 1695 - RNA, 1326 nt, Artificial Sequence; identical to SEQ ID NO: 1694
  mRNA product Design i-3 (hSL-A100) comprising derived and/or modified sequence from RVA/DS-1/P[4]__ABV53252.1__P2_VP8*(41-223)_Ferritin (opt5)

SEQ ID NO: 1696 - RNA, 1326 nt, Artificial Sequence
  mRNA product Design i-3 (hSL-A100) comprising derived and/or modified sequence from RVA/F01322/P[6]__AFA51886.1__P2_VP8*(41-223)_Ferritin (opt5)
aggagaaagcuuaccaugcaguacaucaaggccaacagcaaauucauuggcaucaccgagcugggguccggaucuggcgcucaaacaaauuaugcccccgugacguggagccacggggaagucaacgacuccaccacaauugagccuguucucgauggaccguaccagcccaccaauuuuaagccucccaacgacuauuggauccugcuuaauccuacaaaccaacagguggugcuggaaggcaccaauaaaacagauauuugggucgcgcuccugcuuguggagcccaacguuaccaaucagucucggcaguacacgcuguucggggaaaccaagcagaucacaguggagaacaauaccaacaaauggaaguuuuucgagauguuucggagcuccgucucugcugaguuccagcauaagcgcacacucaccagcgacacgaaacuggccggauuuaugaaguucuauaauuccguguggacauuucacggcgaaaccccuaacgccacaaccgauuacagcucuaccuccaaucuguucgaaguugagacagugauccaugucgaguuuuauauuaucccgagaagccaagaaucuaaaugcuccgaguacauuaacacgggccucagcgggggagacaucauuaagcugcuuaacgaacaggugaauaaagagaugcagucuuccaaccuguacaugagcauguccucuugguguuauacccacagccucgauggcgcugggcuguuccuuuuugaccaugccgcugaagaguacgagcacgccaagaagcugaucauuuuccucaaugaaaacaaugugcccguccagcugacauccaucagcgcgccugagcacaaauucgaaggacugacccaaaucuuucagaaggccuaugagcaugaacagcacauuucugaguccaucaacaauauuguugaucaugcuaucaaaagcaaggaccacgccacauucaacuuucuccaaugguacguggcugagcagcacgaagaggaagugcuguucaaagauauucuugacaagaucgagcugaucggcaaugaaaaccaugggcucuaucuggccgaucaguacgucaaaggaauugcgaagucuagaaagagcugaggacuaguuauaagacugacuagcccgaugggccucccaacgggcccuccuccccuccuugcaccgagauuaaucaaaggcucuuuucagagccaccaaaaaaaaaaaaaaaaaaaaaaaaaaaaaaaaaaaaaaaaaaaaaaaaaaaaaaaaaaaaaaaaaaaaaaaaaaaaaaaaaaaaaaaaaaaaaaaaaaaaa

SEQ ID NO: 1697 - RNA, 1326 nt, Artificial Sequence
  mRNA product Design i-3 (hSL-A100) comprising derived and/or modified sequence from RVA/1076/P[6]__AAA47337.1__P2_VP8*(41-223)_Ferritin (opt5)
aggagaaagcuuaccaugcaguacaucaaggccaacagcaaauucauuggcaucaccgagcugggguccggaucuggcgcucaaacaaauuaugcccccgugacguggagccacggggaagucaacgacuccaccacaauugagccuguucucgauggaccguaccagcccaccucuuuuaagccucccagcgacuauuggauccugcuuaauccuacaaaccaacagguggugcuggaaggcaccaauaaaacagauauuugggucgcgcuccugcuuguggagcccaacguuaccaaucaguccagacaguacacgcuguucggggaaaccaagcagaucacaguggagaacaauaccaacaaauggaaguuuuucgagauguuucggucuagcgucuccgcugaguuccagcauaagcgcacacucaccagcgacacgaaacuggccggauuucugaaguucuauaauucuguguggacauuuuacggcgaaaccccucacgccacaaccgauuauuccagcaccucuaaccucuccgaaguugagacagcuauccauguggaguucuacauuaucccgagaagccaagaaucuaaaugcaaugaguacauuaacacgggccuguccgggggagacaucauuaaacuucugaaugaacaggucaacaaggagaugcagagcuccaaccucuauaugucuaugagcuccugguguuacacccacagccuggauggcgccgggcuuuuucuguucgaccaugcugccgaagaguaugagcacgcgaagaagcucaucauuuuucugaaugaaaacaaugugcccgugcagcugacaucuaucuccgccccugagcacaaauucgaaggacucacccaaaucuuccagaaggcuuacgagcaugaacagcacauuagcgagucuaucaacaauauugucgaucaugccaucaaaagcaaggaccacgcuacauuuaacuuccugcaaugguauguugccgagcagcacgaagaggaagugcuuuuuaaagauauucuggacaagaucgagcucaucggcaaugaaaaccaugggcuguaccuugcggaucaguaugugaaaggaauugccaagucccggaagucuugaggacuaguuauaagacugacuagcccgaugggccucccaacgggcccuccuccccuccuugcaccgagauuaaucaaaggcucuuuucagagccaccaaaaaaaaaaaaaaaaaaaaaaaaaaaaaaaaaaaaaaaaaaaaaaaaaaaaaaaaaaaaaaaaaaaaaaaaaaaaaaaaaaaaaaaaaaaaaaaaaaaaa

SEQ ID NO: 1698 - RNA, 1326 nt, Artificial Sequence
  mRNA product Design i-3 (hSL-A100) comprising derived and/or modified sequence from RVA/BE1128/P[8]__AEX30671.1__P2_VP8*(41-223)_Ferritin (opt5)
aggagaaagcuuaccaugcaguacaucaaggccaacagcaaauucauuggcaucaccgagcugggguccggaucuggcgcucaaacaagauaugcccccgugaauugggggcacggagaaauuaacgacagcacgaccgucgagccuauccucgauggcccguaccagcccacaaccuuuacaccucccaccgacuauuggauucugaucacauccaauaccaacgggguuguguacgaaucuacgaauaacagcgauuucuggaccgcggugaucgcugucgagccucaugugaaucccguugaccggcaguauaacguguuuggagaaaauaagcaguucaacguccgcaaugauuccgacaaauggaaguuucuugagauguucagaggcucuagccaaaacgauuuuuacaaucggcgcacacugaccuccgacacaagacucgugggcauucugaaauaugggggacggguuuggaccuuccacggcgagacgccucgcgccacaaccgauagcucuaacacagccaaucuugacgggaucuccauuaccauccauagcgaauuuuacauuaucccgagaucucaggaguccaagugcaacgaauacauuaacaauggacugagcggcggggauaucaucaagcuccugaacgaacaggugaauaaagagaugcagucuuccaaccuguauaugagcauguccucuugguguuacacccacagccucgacggagcuggccuguuccuuuuugaucaugccgcugaggaguaugaacacgccaagaaacugauuaucuuccucaaugagaacaauguccccgugcaacugacauccauuagcgcgccugaacacaaguuugagggccuuacgcagaucuuccagaaagccuacgagcaugaacagcacauuucugaguccaucaacaauaucguggaccaugcuauuaagagcaaggaccacgccaccuucaacuuucugcaaugguaugucgcugaacagcacgaggaagagguucucuucaaagauauccuggacaagauugagcugaucgggaaugaaaaccauggacucuaccuggccgaucaguaugugaaaggcauugcgaagucucggaaaagcugaggacuaguuauaagacugacuagcccgaugggccucccaacgggcccuccuccccuccuugcaccgagauuaaucaaaggcucuuuucagagccaccaaaaaaaaaaaaaaaaaaaaaaaaaaaaaaaaaaaaaaaaaaaaaaaaaaaaaaaaaaaaaaaaaaaaaaaaaaaaaaaaaaaaaaaaaaaaaaaaaaaaa

SEQ ID NO: 1699 - RNA, 1326 nt, Artificial Sequence
  mRNA product Design i-3 (hSL-A100) comprising derived and/or modified sequence from RVA/Wa-VirWa/P[8]__ACR22783.1__P2_VP8*(41-223)_Ferritin (opt5)
aggagaaagcuuaccaugcaguacaucaaggccaacagcaaauucauuggcaucaccgagcugggguccggaucuggcgcucaaacaagauaugcccccgugaauugggggcacggagaaauuaacgacagcacgaccgucgagccuauccucgauggcccguaccagcccacaaccuuuacaccucccaaugacuauuggauucugaucaacuccaauaccaacgggguuguguacgaaucuacaaauaacagcgauuucuggaccgcgguggucgcuaucgagccucaugugaaucccguugaccggcaguauacgauuuuuggagaauccaagcaguucaacgugcgcaaugauucuaacaaauggaaguuucuugagauguucagaagcuccagccaaaaugaguuuuacaaccggcgcacccugacaucugacaccagacucgucggcauccugaaauauggcgggcggguguggacauuccacggagaaaccccucgcgccacgacagauuccagcucuaccgccaaucuuaacaacauuuccaucacaauucauagcgaguuuuacaucauuccgagaucucaggaauccaagugcaaugaguacaucaacaauggccugagcgggggagacaucauuaagcuccugaacgagcagguuaauaaagaaaugcaguccucuaaccuguauaugagcauguccagcugguguuacacccacucucucgauggcgcugggcuguuccuuuuugaccaugccgcugaggaauaugagcacgccaagaaacugaucauuuuccucaaugaaaacaaugugcccguccaacugaccuccaucagcgcgccugagcacaaguuugagggacuuacacagauuuuccagaaagccuacgaacaugagcagcacaucucugaaagcaucaacaauauuguggaucaugcuaucaaguccaaggaccacgccacguucaacuuucugcaaugguauguggcugagcagcacgaagaggagguccucuucaaagauauucuggacaagaucgaacugauuggcaaugagaaccauggccucuaccuggccgaccaguauguuaaagggaucgcgaagucucggaaaagcugaggacuaguuauaagacugacuagcccgaugggccucccaacgggcccuccuccccuccuugcaccgagauuaaucaaaggcucuuuucagagccaccaaaaaaaaaaaaaaaaaaaaaaaaaaaaaaaaaaaaaaaaaaaaaaaaaaaaaaaaaaaaaaaaaaaaaaaaaaaaaaaaaaaaaaaaaaaaaaaaaaaaa

SEQ ID NO: 1700 - RNA, 1326 nt, Artificial Sequence
  mRNA product Design i-3 (hSL-A100) comprising derived and/or modified sequence from RVA/Wa/P[8]__AAA47290.1__P2_VP8*(41-223)_Ferritin (opt5)
aggagaaagcuuaccaugcaguacaucaaggccaacagcaaauucauuggcaucaccgagcugggguccggaucuggcgcucaaacaagauaugcccccgugaauugggggcacggagaaauuaacgacagcacgaccgucgagccuauccucgauggcccguaccagcccacaaccuuuacaccucccaaugacuauuggauucugaucaacuccaauaccaacgggguuguguacgaaucuacaaauaacagcgauuucuggaccgcgguggucgcuaucgagccucaugugaaucccguugaccggcaguauacgauuuuuggagaauccaagcaguucaacgugucuaaugauagcaacaaauggaaguuucuugagauguuccgcuccagcucucaaaaugaguuuuacaacagacggacccugacauccgacacccgcuucgucggcauccucaaauauggcgggagaguguggacauuucacggagaaaccccucgggccacgacagauagcagcuccaccgccaaucugaacaacauuagcaucacaauucauucugaguucuacaucauuccgcgcucccaggaaagcaagugcaaugaguacaucaacaauggccuuuccgggggagacaucauuaagcugcucaacgagcagguuaauaaagaaaugcagucuagcaaccuguauauguccaugagcucuugguguuacacccacucccuggauggcgcugggcucuuucuguucgaccaugccgcugaggaauaugagcacgccaagaaacuuaucauuuuucugaaugaaaacaaugugcccguccaacucaccagcaucucugcgccugagcacaaguucgagggacugacacagauuuuccagaaagccuacgaacaugagcagcacaucagcgaauccaucaacaauauuguggaucaugcuaucaagucuaaggaccacgccacguuuaacuuccuucaaugguauguggcugagcagcacgaagaggagguccuguuuaaagauauucucgacaagaucgaacugauuggcaaugagaaccauggccuguaccucgccgaccaguauguuaaagggaucgcgaagucuagaaaauccugaggacuaguuauaagacugacuagcccgaugggccucccaacgggcccuccuccccuccuugcaccgagauuaaucaaaggcucuuuucagagccaccaaaaaaaaaaaaaaaaaaaaaaaaaaaaaaaaaaaaaaaaaaaaaaaaaaaaaaaaaaaaaaaaaaaaaaaaaaaaaaaaaaaaaaaaaaaaaaaaaaaaa

SEQ ID NO: 1701 - RNA, 1326 nt, Artificial Sequence
  mRNA product Design i-3 (hSL-A100) comprising derived and/or modified sequence from RVA/Wa/P[8]__AAA66953.1__P2_VP8*(41-223)_Ferritin (opt5)
aggagaaagcuuaccaugcaguacaucaaggccaacagcaaauucauuggcaucaccgagcugggguccggaucuggcgcucaaacaagauaugcccccgugaauugggggcacggagaaauuaacgacagcacgaccgucgagccuaugcucgauggcccguaccagcccacaaccuuuacaccucccaaugacuauuggauccugauuaacuccaauaccaacgggguuguguacgaaucuacaaauaacagcgauuucuggaccgcgguggucgcuaucgagccucaugugaaucccguugaccggcaguauacgaucuuuggagaauccaagcaguucaacgugucuaaugauagcaacaaauggaaguuucuugagauguuccgcuccagcucucaaaaugaguuuuacaacagacggacccugacauccgacacccgcuucgucggcauucucaaauauggcgggagaguguggacauuucacggagaaaccccucgggccacgacagauagcagcuccaccgccaaucugaacaacaucagcauuacaauccauucugaguucuacauuaucccgcgcucccaggaaagcaagugcaaugaguacauuaacaauggccuuuccgggggagacaucaucaagcugcucaacgagcagguuaauaaagaaaugcagucuagcaaccuguauauguccaugagcucuugguguuacacccacucccuggauggcgcugggcucuuucuguucgaccaugccgcugaggaauaugagcacgccaagaaacuuauuaucuuucugaaugaaaacaaugugcccguccaacucaccagcauuucugcgccugagcacaaguucgagggacugacacagaucuuccagaaagccuacgaacaugagcagcacauuagcgaauccaucaacaauaucguggaucaugcuauuaagucuaaggaccacgccacguuuaacuuccuucaaugguauguggcugagcagcacgaagaggagguccuguuuaaagauauccucgacaagauugaacugaucggcaaugagaaccauggccuguaccucgccgaccaguauguuaaagggauugcgaagucuagaaaauccugaggacuaguuauaagacugacuagcccgaugggccucccaacgggcccuccuccccuccuugcaccgagauuaaucaaaggcucuuuucagagccaccaaaaaaaaaaaaaaaaaaaaaaaaaaaaaaaaaaaaaaaaaaaaaaaaaaaaaaaaaaaaaaaaaaaaaaaaaaaaaaaaaaaaaaaaaaaaaaaaaaaaa

SEQ ID NO: 1702 - RNA, 1260 nt, Artificial Sequence
  mRNA product Design i-3 (hSL-A100) comprising derived and/or modified sequence from RVA/BE1058/P[4]__AEX30665.1__LumSynt_P2_VP8*(65-223) (opt5)
aggagaaagcuuaccaugcagaucuacgagggcaagcugaccgccgaagggcucagauucggaauuguggcuagccgguuuaaccacgcccuggucgaccgccuuguugagggcgcgaucgaugcuauugugagacaugggggacgggaagaggacaucacacuggugcgcguccccggcuccugggaaauuccuguggccgccggggagcucgcuagaaaagaggauaucgacgccguuaucgcuauuggagugcugauccggggcgccacgccgcacuucgauuauauugcgucugaagucagcaagggccuugccgaccugucccucgagcugcgcaaacccaucaccuuuggggugauuacagcugauacccuggaacaagccaucgagagagcuggaacaaagcauggcaauaaagggugggaggccgcgcucucugccauugaaauggcuaaccuguucaagagccuucggggaggcuccgggggaucuggcggcagcgggggauccggcgggggacaguacaucaaggccaauagcaaauuuaucggcauuaccgagcuggggucuggauccggccucgacggcccuuaucagcccacaaccuucaagccucccaacgauuacuggcugcuuaucagcucuaauacggacgggguuguguaugaauccaccaacaauagcgauuuuuggacagcugucauugccguggagccucacgugaaccagaccaaucgccaauacguccuguucggagaaaacaaacaguuuaauaucgagaacucuuccgacaaguggaaauucuuugagauguucaagggcaauagccaguccgauuuuucuaacagacggacacucaccagcuccaaucgccugguugggaugcugaaguauggaggcagaguguggacguuccauggggaaacaccgcgggccaccacagacucuagcuccaccgcugaccucaacaacauuagcaucaucauucacucugaguucuacaucauuccccgcagccaggaauccaaaugcaaugaguacaucaacaauggccugugaggacuaguuauaagacugacuagcccgaugggccucccaacgggcccuccuccccuccuugcaccgagauuaaucaaaggcucuuuucagagccaccaaaaaaaaaaaaaaaaaaaaaaaaaaaaaaaaaaaaaaaaaaaaaaaaaaaaaaaaaaaaaaaaaaaaaaaaaaaaaaaaaaaaaaaaaaaaaaaaaaaaa

SEQ ID NO: 1703 - RNA, 1260 nt, Artificial Sequence
  mRNA product Design i-3 (hSL-A100) comprising derived and/or modified sequence from RVA/DS-1/P[4]__CAD62680.1__LumSynt_P2_VP8*(65-223) (opt5)
aggagaaagcuuaccaugcagaucuacgagggcaagcugaccgccgaagggcucagauucggaauuguggcuagccgguuuaaccacgcccuggucgaccgccuuguugagggcgcgaucgaugcuauugugagacaugggggacgggaagaggacaucacacuggugcgcguccccggcuccugggaaauuccuguggccgccggggagcucgcuagaaaagaggauaucgacgccguuaucgcuauuggagugcugauccggggcgccacgccgcacuucgauuauauugcgucugaagucagcaagggccuugccgaccugucccucgagcugcgcaaacccaucaccuuuggggugauuacagcugauacccuggaacaagccaucgagagagcuggaacaaagcauggcaauaaagggugggaggccgcgcucucugccauugaaauggcuaaccuguucaagagccuucggggaggcuccgggggaucuggcggcagcgggggauccggcgggggacaguacaucaaggccaauagcaaauuuaucggcauuaccgagcuggggucuggauccggccucgacggcccuuaucagcccacaaccuucaagccucccaacgauuacuggcugcuuaucagcucuaauacgaacgggguuguguaugaauccaccaauaacaaugacuuuuggacagcugucagcucuguggagccucacgugucccagaccaaccgccaauacauucuguucggagaaaauaaacaguuuaacgucgagaauaacagcgauaaguggaaauucuuugagacauucaccggcuccucucaggggaauuuuagcaacagacggacgcucacauccagcaaccgccugguuggaaugcugaaguauggcgggagaguguggaccuuccauggcgaaacaccgcgggccaccaccgacucuuccaauacagccgaucucaacaauaucagcauuaucauccacucugaguucuacauuaucccccgcagccaggaauccaagugcaacgaguacauuaauaacggacugugaggacuaguuauaagacugacuagcccgaugggccucccaacgggcccuccuccccuccuugcaccgagauuaaucaaaggcucuuuucagagccaccaaaaaaaaaaaaaaaaaaaaaaaaaaaaaaaaaaaaaaaaaaaaaaaaaaaaaaaaaaaaaaaaaaaaaaaaaaaaaaaaaaaaaaaaaaaaaaaaaaaaa

SEQ ID NO: 1704 - RNA, 1260 nt, Artificial Sequence; identical to SEQ ID NO: 1703
  mRNA product Design i-3 (hSL-A100) comprising derived and/or modified sequence from RVA/DS-1/P[4]__ABV53252.1__LumSynt_P2_VP8*(65-223) (opt5)

SEQ ID NO: 1705 - RNA, 1260 nt, Artificial Sequence
  mRNA product Design i-3 (hSL-A100) comprising derived and/or modified sequence from RVA/F01322/P[6]__AFA51886.1__LumSynt_P2_VP8*(65-223) (opt5)
aggagaaagcuuaccaugcagaucuacgagggcaagcugaccgccgaagggcucagauucggaauuguggcuagccgguuuaaccacgcccuggucgaccgccuuguugagggcgcgaucgaugcuauugugagacaugggggacgggaagaggacaucacacuggugcgcguccccggcuccugggaaauuccuguggccgccggggagcucgcuagaaaagaggauaucgacgccguuaucgcuauuggagugcugauccggggcgccacgccgcacuucgauuauauugcgucugaagucagcaagggccuugccgaccugucccucgagcugcgcaaacccaucaccuuuggggugauuacagcugauacccuggaacaagccaucgagagagcuggaacaaagcauggcaauaaagggugggaggccgcgcucucugccauugaaauggcuaaccuguucaagagccuucggggaggcuccgggggaucuggcggcagcgggggauccggcgggggacaguacaucaaggccaauagcaaauuuaucggcauuaccgagcuggggucuggauccggccucgacggcccuuaucagcccacaaacuucaagccucccaaugauuacuggauccugcuuaacccuaccaaucagcaaguugugcuggaagggacgaacaaaaccgacauuugggucgcucuccugcugguggagccgaaugugacaaaccagagccgccaguauacccucuuuggagaaacaaagcagaucaccgucgagaauaacacgaauaaauggaaguucuuugagauguucagaucuuccguuagcgccgaauuucaacacaagcggacacugaccucugauacaaaacuugccggcuucaugaaguuuuacaacuccguguggaccuuccauggggagacccccaaugcuacaacggacuauagcuccaccucuaaccuguucgaaguggagacagucauucacguggaauuuuacaucaucccucgcagccaggaguccaaaugcagcgaguacauuaacaccggacucugaggacuaguuauaagacugacuagcccgaugggccucccaacgggcccuccuccccuccuugcaccgagauuaaucaaaggcucuuuucagagccaccaaaaaaaaaaaaaaaaaaaaaaaaaaaaaaaaaaaaaaaaaaaaaaaaaaaaaaaaaaaaaaaaaaaaaaaaaaaaaaaaaaaaaaaaaaaaaaaaaaaaa

SEQ ID NO: 1706 - RNA, 1260 nt, Artificial Sequence
  mRNA product Design i-3 (hSL-A100) comprising derived and/or modified sequence from RVA/1076/P[6]__AAA47337.1__LumSynt_P2_VP8*(65-223) (opt5)
aggagaaagcuuaccaugcagaucuacgagggcaagcugaccgccgaagggcucagauucggaauuguggcuagccgguuuaaccacgcccuggucgaccgccuuguugagggcgcgaucgaugcuauugugagacaugggggacgggaagaggacaucacacuggugcgcguccccggcuccugggaaauuccuguggccgccggggagcucgcuagaaaagaggauaucgacgccguuaucgcuauuggagugcugauccggggcgccacgccgcacuucgauuauauugcgucugaagucagcaagggccuugccgaccugucccucgagcugcgcaaacccaucaccuuuggggugauuacagcugauacccuggaacaagccaucgagagagcuggaacaaagcauggcaauaaagggugggaggccgcgcucucugccauugaaauggcuaaccuguucaagagccuucggggaggcuccgggggaucuggcggcagcgggggauccggcgggggacaguacaucaaggccaauagcaaauuuaucggcauuaccgagcuggggucuggauccggccucgacggcccuuaucagcccaccagcuucaagccucccucugauuacuggauccugcuuaacccuaccaaucagcaaguugugcuggaagggacgaacaaaaccgacauuugggucgcucuccugcugguggagccgaaugugacaaaccagucccgccaguauacccucuuuggagaaacaaagcagaucaccgucgagaauaacacgaauaaauggaaguucuuugagauguucagaagcucuguuuccgccgaauuucaacacaagcggacacugaccagcgauacaaaacuugccggcuuccugaaguuuuacaacuccguguggaccuucuauggggagacaccccaugcuacaacggacuacucuagcaccuccaaucucagcgaaguggagacagcgauucacgucgaguucuacaucaucccucgcucucaggaauccaaaugcaacgaguauauuaauaccggacugugaggacuaguuauaagacugacuagcccgaugggccucccaacgggcccuccuccccuccuugcaccgagauuaaucaaaggcucuuuucagagccaccaaaaaaaaaaaaaaaaaaaaaaaaaaaaaaaaaaaaaaaaaaaaaaaaaaaaaaaaaaaaaaaaaaaaaaaaaaaaaaaaaaaaaaaaaaaaaaaaaaaaa

SEQ ID NO: 1707 - RNA, 1260 nt, Artificial Sequence
  mRNA product Design i-3 (hSL-A100) comprising derived and/or modified sequence from RVA/BE1128/P[8]__AEX30671.1__LumSynt_P2_VP8*(65-223) (opt5)
aggagaaagcuuaccaugcagaucuacgagggcaagcugaccgccgaagggcucagauucggaauuguggcuagccgguuuaaccacgcccuggucgaccgccuuguugagggcgcgaucgaugcuauugugagacaugggggacgggaagaggacaucacacuggugcgcguccccggcuccugggaaauuccuguggccgccggggagcucgcuagaaaagaggauaucgacgccguuaucgcuauuggagugcugauccggggcgccacgccgcacuucgauuauauugcgucugaagucagcaagggccuugccgaccugucccucgagcugcgcaaacccaucaccuuuggggugauuacagcugauacccuggaacaagccaucgagagagcuggaacaaagcauggcaauaaagggugggaggccgcgcucucugccauugaaauggcuaaccuguucaagagccuucggggaggcuccgggggaucuggcggcagcgggggauccggcgggggacaguacaucaaggccaauagcaaauuuaucggcauuaccgagcuggggucuggauccggccucgacggcccuuaucagcccacaaccuucacgccucccaccgauuacuggauccugauuacaagcaacaccaaugggguuguguaugaaucuacaaacaauuccgacuuuuggaccgcugucaucgccguggagccucacgugaacccggucgaucgccaguacaauguuuucggagaaaacaagcaauuuaaugugagaaacgacagcgauaaauggaaguuccuugagauguuucgggggucuucccagaaugacuucuauaaccgcagaacgcugacaagcgacacccggcucgugggcauucugaaauacggaggccgcgucuggacauuucauggggagacccccagagccaccacagauuccucuaauacggcuaaccuggacggcaucagcaucaccauucacuccgaguucuacaucauuccucggagccaggaaucuaagugcaacgaauauaucaauaacggacucugaggacuaguuauaagacugacuagcccgaugggccucccaacgggcccuccuccccuccuugcaccgagauuaaucaaaggcucuuuucagagccaccaaaaaaaaaaaaaaaaaaaaaaaaaaaaaaaaaaaaaaaaaaaaaaaaaaaaaaaaaaaaaaaaaaaaaaaaaaaaaaaaaaaaaaaaaaaaaaaaaaaaa

SEQ ID NO: 1708 - RNA, 1260 nt, Artificial Sequence
  mRNA product Design i-3 (hSL-A100) comprising derived and/or modified sequence from RVA/Wa-VirWa/P[8]__ACR22783.1__LumSynt_P2_VP8*(65-223) (opt5)
aggagaaagcuuaccaugcagaucuacgagggcaagcugaccgccgaagggcucagauucggaauuguggcuagccgguuuaaccacgcccuggucgaccgccuuguugagggcgcgaucgaugcuauugugagacaugggggacgggaagaggacaucacacuggugcgcguccccggcuccugggaaauuccuguggccgccggggagcucgcuagaaaagaggauaucgacgccguuaucgcuauuggagugcugauccggggcgccacgccgcacuucgauuauauugcgucugaagucagcaagggccuugccgaccugucccucgagcugcgcaaacccaucaccuuuggggugauuacagcugauacccuggaacaagccaucgagagagcuggaacaaagcauggcaauaaagggugggaggccgcgcucucugccauugaaauggcuaaccuguucaagagccuucggggaggcuccgggggaucuggcggcagcgggggauccggcgggggacaguacaucaaggccaauagcaaauuuaucggcauuaccgagcuggggucuggauccggccucgacggcccuuaucagcccacaaccuucacgccucccaacgauuacuggauccugauuaauagcaacaccaaugggguuguguaugaaucuacaaacaauuccgacuuuuggaccgcugucguggccaucgagccucacgugaacccggucgaucgccaguacacaauuuucggagaaagcaagcaauuuaauguuagaaacgacucuaauaaauggaaguuccuugagauguuucgguccagcucccagaacgaguucuauaaucgcagaacccugacgucugauacacggcucgugggcauccugaaauacgggggacgcguguggaccuuucauggcgaaacacccagagccaccaccgacagcuccagcacagcuaaccugaacaauaucucuauuacgauccacuccgaguucuacauuaucccucggagccaggaaucuaagugcaacgaguauauuaauaacgggcucugaggacuaguuauaagacugacuagcccgaugggccucccaacgggcccuccuccccuccuugcaccgagauuaaucaaaggcucuuuucagagccaccaaaaaaaaaaaaaaaaaaaaaaaaaaaaaaaaaaaaaaaaaaaaaaaaaaaaaaaaaaaaaaaaaaaaaaaaaaaaaaaaaaaaaaaaaaaaaaaaaaaaa

SEQ ID NO: 1709 - RNA, 1260 nt, Artificial Sequence
  mRNA product Design i-3 (hSL-A100) comprising derived and/or modified sequence from RVA/Wa/P[8]__AAA47290.1__LumSynt_P2_VP8*(65-223) (opt5)
aggagaaagcuuaccaugcagaucuacgagggcaagcugaccgccgaagggcucagauucggaauuguggcuagccgguuuaaccacgcccuggucgaccgccuuguugagggcgcgaucgaugcuauugugagacaugggggacgggaagaggacaucacacuggugcgcguccccggcuccugggaaauuccuguggccgccggggagcucgcuagaaaagaggauaucgacgccguuaucgcuauuggagugcugauccggggcgccacgccgcacuucgauuauauugcgucugaagucagcaagggccuugccgaccugucccucgagcugcgcaaacccaucaccuuuggggugauuacagcugauacccuggaacaagccaucgagagagcuggaacaaagcauggcaauaaagggugggaggccgcgcucucugccauugaaauggcuaaccuguucaagagccuucggggaggcuccgggggaucuggcggcagcgggggauccggcgggggacaguacaucaaggccaauagcaaauuuaucggcauuaccgagcuggggucuggauccggccucgacggcccuuaucagcccacaaccuucacgccucccaacgauuacuggauccugauuaauagcaacaccaaugggguuguguaugaaucuacaaacaauuccgacuuuuggaccgcugucguggccaucgagccucacgugaacccggucgaucgccaguacacaauuuucggagaaagcaagcaauuuaauguuucuaacgacuccaauaaauggaaguuccuugagauguuuagaagcuccucucagaacgaguucuauaaucggcgcacccugacgagcgauacaagauuugugggcauccucaaauacgggggacggguguggaccuuccauggcgaaacaccccgcgccaccaccgacuccagcucuacagcuaaccugaacaauaucuccauuacgauccacagcgaguucuacauuaucccuagaucucaggaaagcaagugcaacgaguauauuaauaacgggcugugaggacuaguuauaagacugacuagcccgaugggccucccaacgggcccuccuccccuccuugcaccgagauuaaucaaaggcucuuuucagagccaccaaaaaaaaaaaaaaaaaaaaaaaaaaaaaaaaaaaaaaaaaaaaaaaaaaaaaaaaaaaaaaaaaaaaaaaaaaaaaaaaaaaaaaaaaaaaaaaaaaaaa

SEQ ID NO: 1710 - RNA, 1260 nt, Artificial Sequence; identical to SEQ ID NO: 1709
  mRNA product Design i-3 (hSL-A100) comprising derived and/or modified sequence from RVA/Wa/P[8]__AAA66953.1__LumSynt_P2_VP8*(65-223) (opt5)

SEQ ID NO: 1711 - RNA, 1332 nt, Artificial Sequence
  mRNA product Design i-3 (hSL-A100) comprising derived and/or modified sequence from RVA/BE1058/P[4]__AEX30665.1__LumSynt_P2_VP8*(41-223) (opt5)
aggagaaagcuuaccaugcagaucuacgagggcaagcugaccgccgaagggcucagauucggaauuguggcuagccgguuuaaccacgcccuggucgaccgccuuguugagggcgcgaucgaugcuauugugagacaugggggacgggaagaggacaucacacuggugcgcguccccggcuccugggaaauuccuguggccgccggggagcucgcuagaaaagaggauaucgacgccguuaucgcuauuggagugcugauccggggcgccacgccgcacuucgauuauauugcgucugaagucagcaagggccuugccgaccugucccucgagcugcgcaaacccaucaccuuuggggugauuacagcugauacccuggaacaagccaucgagagagcuggaacaaagcauggcaauaaagggugggaggccgcgcucucugccauugaaauggcuaaccuguucaagagccuucggggaggcuccgggggaucuggcggcagcgggggauccggcgggggacaguacaucaaggccaauagcaaauuuaucggcauuaccgagcuggggucuggauccggcgcucagacacgcuaugccccuguuaacuggggccacggggaaaucaaugacagcaccacgguggagcccguccucgauggaccuuaccagcccaccacauucaagccuccgaacgacuauuggcugcuuauuucuuccaauaccgauggcgugguguacgaaagcacaaacaauucugacuuuuggaccgccgucaucgcuguugagccccaugugaaccaaacgaauagacaguaugugcuguucggggagaacaaacaguuuaauauugaaaacuccagcgauaaguggaaauucuuugagauguucaagggaaauucccagucugacuuuagcaaccggcgcacacucaccuccagcaacagacuggucggcaugcugaaguacgggggccggguguggacauuccacggagaaaccccucgcgcgaccacagacucuuccagcacggccgaucucaauaacaucucuaucauuauccacagcgaguucuacauuauccccagaucccaagaaucuaaaugcaaugaguauauuaacaauggccugugaggacuaguuauaagacugacuagcccgaugggccucccaacgggcccuccuccccuccuugcaccgagauuaaucaaaggcucuuuucagagccaccaaaaaaaaaaaaaaaaaaaaaaaaaaaaaaaaaaaaaaaaaaaaaaaaaaaaaaaaaaaaaaaaaaaaaaaaaaaaaaaaaaaaaaaaaaaaaaaaaaaaa

SEQ ID NO: 1712 - RNA, 1332 nt, Artificial Sequence
  mRNA product Design i-3 (hSL-A100) comprising derived and/or modified sequence from RVA/DS-1/P[4]__CAD62680.1__LumSynt_P2_VP8*(41-223) (opt5)
aggagaaagcuuaccaugcagaucuacgagggcaagcugaccgccgaagggcucagauucggaauuguggcuagccgguuuaaccacgcccuggucgaccgccuuguugagggcgcgaucgaugcuauugugagacaugggggacgggaagaggacaucacacuggugcgcguccccggcuccugggaaauuccuguggccgccggggagcucgcuagaaaagaggauaucgacgccguuaucgcuauuggagugcugauccggggcgccacgccgcacuucgauuauauugcgucugaagucagcaagggccuugccgaccugucccucgagcugcgcaaacccaucaccuuuggggugauuacagcugauacccuggaacaagccaucgagagagcuggaacaaagcauggcaauaaagggugggaggccgcgcucucugccauugaaauggcuaaccuguucaagagccuucggggaggcuccgggggaucuggcggcagcgggggauccggcgggggacaguacaucaaggccaauagcaaauuuaucggcauuaccgagcuggggucuggauccggcgcucagacacgcuaugccccuguuaacuggggcagcugggaaaucaaugacucuaccacgguggagcccguccucgaugggccuuaccagcccaccacauucaagccuccgaacgacuauuggcugcuuauuuccagcaauaccaacggagugguguacgaaucuacaaauaacaaugauuuuuggaccgccgucuccagcguugagccccacgugucccaaacgaacagacaguauauccuguucggcgagaauaaacaguuuaacguggaaaauaacucugacaaguggaaauucuuugagacauucaccgggagcucccagggaaacuuuagcaaucggcgcacacucaccucuuccaacagacuggucggcaugcugaaguacgggggccggguguggaccuuccauggagaaacaccucgcgcuacgaccgauagcucuaauacagcggaccucaacaauauuagcaucaucauucacuccgaguucuacaucauucccagaucucaagaaagcaagugcaacgaguauaucaauaacggccugugaggacuaguuauaagacugacuagcccgaugggccucccaacgggcccuccuccccuccuugcaccgagauuaaucaaaggcucuuuucagagccaccaaaaaaaaaaaaaaaaaaaaaaaaaaaaaaaaaaaaaaaaaaaaaaaaaaaaaaaaaaaaaaaaaaaaaaaaaaaaaaaaaaaaaaaaaaaaaaaaaaaaa

SEQ ID NO: 1713 - RNA, 1332 nt, Artificial Sequence; identical to SEQ ID NO: 1712
  mRNA product Design i-3 (hSL-A100) comprising derived and/or modified sequence from RVA/DS-1/P[4]__ABV53252.1__LumSynt_P2_VP8*(41-223) (opt5)

SEQ ID NO: 1714 - RNA, 1332 nt, Artificial Sequence
  mRNA product Design i-3 (hSL-A100) comprising derived and/or modified sequence from RVA/F01322/P[6]__AFA51886.1__LumSynt_P2_VP8*(41-223) (opt5)
aggagaaagcuuaccaugcagaucuacgagggcaagcugaccgccgaagggcucagauucggaauuguggcuagccgguuuaaccacgcccuggucgaccgccuuguugagggcgcgaucgaugcuauugugagacaugggggacgggaagaggacaucacacuggugcgcguccccggcuccugggaaauuccuguggccgccggggagcucgcuagaaaagaggauaucgacgccguuaucgcuauuggagugcugauccggggcgccacgccgcacuucgauuauauugcgucugaagucagcaagggccuugccgaccugucccucgagcugcgcaaacccaucaccuuuggggugauuacagcugauacccuggaacaagccaucgagagagcuggaacaaagcauggcaauaaagggugggaggccgcgcucucugccauugaaauggcuaaccuguucaagagccuucggggaggcuccgggggaucuggcggcagcgggggauccggcgggggacaguacaucaaggccaauagcaaauuuaucggcauuaccgagcuggggucuggauccggcgcucagacaaacuaugccccuguuaccuggagccacggcgaagugaaugacucuacgaccaucgagcccguccucgaugggccuuaccagcccacaaacuucaagccuccgaaugacuauuggauucugcuuaaccccaccaaucaacagguggugcuggaaggaacaaacaaaaccgauaucugggucgcccuccugcugguugagccuaaugugacgaaccagucccgccaguacacacucuuuggcgagaccaagcaaauuacaguggaaaauaacaccaauaaauggaaguucuuugagauguucagaagcucugucuccgcugaauuucagcauaagcggacccugacaagcgacacgaaacuugcgggguucaugaaguuuuauaacuccguguggaccuuccacggagagacacccaacgccaccacagauuacucuagcaccuccaaucuguucgaaguugagacggugauccacgucgaguuuuacaucauuccucgcagccaggaaucuaaaugcuccgaguauaucaacacaggccucugaggacuaguuauaagacugacuagcccgaugggccucccaacgggcccuccuccccuccuugcaccgagauuaaucaaaggcucuuuucagagccaccaaaaaaaaaaaaaaaaaaaaaaaaaaaaaaaaaaaaaaaaaaaaaaaaaaaaaaaaaaaaaaaaaaaaaaaaaaaaaaaaaaaaaaaaaaaaaaaaaaaaa

SEQ ID NO: 1715 - RNA, 1332 nt, Artificial Sequence
  mRNA product Design i-3 (hSL-A100) comprising derived and/or modified sequence from RVA/1076/P[6]__AAA47337.1__LumSynt_P2_VP8*(41-223) (opt5)
aggagaaagcuuaccaugcagaucuacgagggcaagcugaccgccgaagggcucagauucggaauuguggcuagccgguuuaaccacgcccuggucgaccgccuuguugagggcgcgaucgaugcuauugugagacaugggggacgggaagaggacaucacacuggugcgcguccccggcuccugggaaauuccuguggccgccggggagcucgcuagaaaagaggauaucgacgccguuaucgcuauuggagugcugauccggggcgccacgccgcacuucgauuauauugcgucugaagucagcaagggccuugccgaccugucccucgagcugcgcaaacccaucaccuuuggggugauuacagcugauacccuggaacaagccaucgagagagcuggaacaaagcauggcaauaaagggugggaggccgcgcucucugccauugaaauggcuaaccuguucaagagccuucggggaggcuccgggggaucuggcggcagcgggggauccggcgggggacaguacaucaaggccaauagcaaauuuaucggcauuaccgagcuggggucuggauccggcgcucagacaaacuaugccccuguuaccuggagccacggcgaagugaaugacucuacgaccaucgagcccguccucgaugggccuuaccagcccacauccuucaagccuccgagcgacuauuggauucugcuuaaccccaccaaucaacagguggugcuggaaggaacaaacaaaaccgauaucugggucgcccuccugcugguugagccuaaugugacgaaccagucucgccaguacacacucuuuggcgagaccaagcaaauuacaguggaaaauaacaccaauaaauggaaguucuuugagauguucagauccagcgucuccgcugaauuucagcauaagcggacccugacaucugacacgaaacuugcgggguuccugaaguuuuauaacagcguguggaccuucuacggagagacaccccacgccaccacagauuacuccagcaccucuaaucucuccgaaguugagacggcuauccacguggaguucuauaucauuccucgcagccaggaaucuaaaugcaacgaguacaucaacacaggccugugaggacuaguuauaagacugacuagcccgaugggccucccaacgggcccuccuccccuccuugcaccgagauuaaucaaaggcucuuuucagagccaccaaaaaaaaaaaaaaaaaaaaaaaaaaaaaaaaaaaaaaaaaaaaaaaaaaaaaaaaaaaaaaaaaaaaaaaaaaaaaaaaaaaaaaaaaaaaaaaaaaaaa

SEQ ID NO: 1716 - RNA, 1332 nt, Artificial Sequence
  mRNA product Design i-3 (hSL-A100) comprising derived and/or modified sequence from RVA/BE1128/P[8]__AEX30671.1__LumSynt_P2_VP8*(41-223) (opt5)
aggagaaagcuuaccaugcagaucuacgagggcaagcugaccgccgaagggcucagauucggaauuguggcuagccgguuuaaccacgcccuggucgaccgccuuguugagggcgcgaucgaugcuauugugagacaugggggacgggaagaggacaucacacuggugcgcguccccggcuccugggaaauuccuguggccgccggggagcucgcuagaaaagaggauaucgacgccguuaucgcuauuggagugcugauccggggcgccacgccgcacuucgauuauauugcgucugaagucagcaagggccuugccgaccugucccucgagcugcgcaaacccaucaccuuuggggugauuacagcugauacccuggaacaagccaucgagagagcuggaacaaagcauggcaauaaagggugggaggccgcgcucucugccauugaaauggcuaaccuguucaagagccuucggggaggcuccgggggaucuggcggcagcgggggauccggcgggggacaguacaucaaggccaauagcaaauuuaucggcauuaccgagcuggggucuggauccggcgcucagacacgcuaugccccuguuaacuggggccacggggaaaucaaugacagcaccacgguggagcccauucucgauggaccuuaccagcccaccacauucaccccuccgacagacuauuggauccugauuaccucuaacacgaauggcgucguguacgaauccacaaacaauagcgauuuuuggaccgccgugaucgcugucgagccccauguuaacccuguggacagacaauauaauguguucggggagaacaagcaguuuaauguccggaacgauucugacaaauggaaguuccuugaaauguuucgcggauccagccagaaugacuucuacaacagacggacacugaccuccgauacccgccucgugggcauccugaaauacgggggcagaguuuggacauuucacggagagacgccccgggcgaccacagacucuagcaacaccgccaaucuggauggcauuuccaucacaauucacagcgaguucuauaucauuccuagaucucaggaauccaagugcaacgaauacaucaauaacgggcucugaggacuaguuauaagacugacuagcccgaugggccucccaacgggcccuccuccccuccuugcaccgagauuaaucaaaggcucuuuucagagccaccaaaaaaaaaaaaaaaaaaaaaaaaaaaaaaaaaaaaaaaaaaaaaaaaaaaaaaaaaaaaaaaaaaaaaaaaaaaaaaaaaaaaaaaaaaaaaaaaaaaaa

SEQ ID NO: 1717 - RNA, 1332 nt, Artificial Sequence
  mRNA product Design i-3 (hSL-A100) comprising derived and/or modified sequence from RVA/Wa-VirWa/P[8]__ACR22783.1__LumSynt_P2_VP8*(41-223) (opt5)
aggagaaagcuuaccaugcagaucuacgagggcaagcugaccgccgaagggcucagauucggaauuguggcuagccgguuuaaccacgcccuggucgaccgccuuguugagggcgcgaucgaugcuauugugagacaugggggacgggaagaggacaucacacuggugcgcguccccggcuccugggaaauuccuguggccgccggggagcucgcuagaaaagaggauaucgacgccguuaucgcuauuggagugcugauccggggcgccacgccgcacuucgauuauauugcgucugaagucagcaagggccuugccgaccugucccucgagcugcgcaaacccaucaccuuuggggugauuacagcugauacccuggaacaagccaucgagagagcuggaacaaagcauggcaauaaagggugggaggccgcgcucucugccauugaaauggcuaaccuguucaagagccuucggggaggcuccgggggaucuggcggcagcgggggauccggcgggggacaguacaucaaggccaauagcaaauuuaucggcauuaccgagcuggggucuggauccggcgcucagacacgcuaugccccuguuaacuggggccacggggaaaucaaugacagcaccacgguggagcccauucucgauggaccuuaccagcccaccacauucaccccuccgaacgacuauuggauccugauuaauucuaacacaaauggcgucguguacgaauccaccaacaauagcgauuuuuggacggccguggucgcuaucgagccccauguuaacccuguggacagacaauauacaaucuucggggagucuaagcaguuuaaugugcggaacgauuccaauaaauggaaguuccuugaaauguuucgcagcuccucucagaacgaguucuacaacagacggacccugacaagcgacacccgccucgucggcauucugaaauacggagggagaguguggaccuuucacggcgaaacaccccgggcgacgaccgacuccagcucuacagccaaucugaacaauaucuccauuaccauccacagcgaguucuauauuaucccuagaucucaggaaagcaagugcaacgaguacaucaauaacggacucugaggacuaguuauaagacugacuagcccgaugggccucccaacgggcccuccuccccuccuugcaccgagauuaaucaaaggcucuuuucagagccaccaaaaaaaaaaaaaaaaaaaaaaaaaaaaaaaaaaaaaaaaaaaaaaaaaaaaaaaaaaaaaaaaaaaaaaaaaaaaaaaaaaaaaaaaaaaaaaaaaaaaa

SEQ ID NO: 1718 - RNA, 1332 nt, Artificial Sequence
  mRNA product Design i-3 (hSL-A100) comprising derived and/or modified sequence from RVA/Wa/P[8]__AAA47290.1__LumSynt_P2_VP8*(41-223) (opt5)
aggagaaagcuuaccaugcagaucuacgagggcaagcugaccgccgaagggcucagauucggaauuguggcuagccgguuuaaccacgcccuggucgaccgccuuguugagggcgcgaucgaugcuauugugagacaugggggacgggaagaggacaucacacuggugcgcguccccggcuccugggaaauuccuguggccgccggggagcucgcuagaaaagaggauaucgacgccguuaucgcuauuggagugcugauccggggcgccacgccgcacuucgauuauauugcgucugaagucagcaagggccuugccgaccugucccucgagcugcgcaaacccaucaccuuuggggugauuacagcugauacccuggaacaagccaucgagagagcuggaacaaagcauggcaauaaagggugggaggccgcgcucucugccauugaaauggcuaaccuguucaagagccuucggggaggcuccgggggaucuggcggcagcgggggauccggcgggggacaguacaucaaggccaauagcaaauuuaucggcauuaccgagcuggggucuggauccggcgcucagacacgcuaugccccuguuaacuggggccacggggaaaucaaugacagcaccacgguggagcccauucucgauggaccuuaccagcccaccacauucaccccuccgaacgacuauuggauccugauuaauucuaacacaaauggcgucguguacgaauccaccaacaauagcgauuuuuggacggccguggucgcuaucgagccccauguuaacccuguggacagacaauauacaaucuucggggagucuaagcaguuuaauguguccaacgauagcaauaaauggaaguuccuugaaauguuucgguccucuagccagaacgaguucuacaaccgcagaacccugacauccgacacccgguuugucggcauucucaaauacggagggcgcguguggaccuuccacggcgaaacacccagagcgacgaccgacucuagcuccacagccaaucugaacaauaucagcauuaccauccacucugaguucuauauuaucccucggagccaggaauccaagugcaacgaguacaucaauaacggacugugaggacuaguuauaagacugacuagcccgaugggccucccaacgggcccuccuccccuccuugcaccgagauuaaucaaaggcucuuuucagagccaccaaaaaaaaaaaaaaaaaaaaaaaaaaaaaaaaaaaaaaaaaaaaaaaaaaaaaaaaaaaaaaaaaaaaaaaaaaaaaaaaaaaaaaaaaaaaaaaaaaaaa

SEQ ID NO: 1719 - RNA, 1332 nt, Artificial Sequence
  mRNA product Design i-3 (hSL-A100) comprising derived and/or modified sequence from RVA/Wa/P[8]__AAA66953.1__LumSynt_P2_VP8*(41-223) (opt5)
aggagaaagcuuaccaugcagaucuacgagggcaagcugaccgccgaagggcucagauucggaauuguggcuagccgguuuaaccacgcccuggucgaccgccuuguugagggcgcgaucgaugcuauugugagacaugggggacgggaagaggacaucacacuggugcgcguccccggcuccugggaaauuccuguggccgccggggagcucgcuagaaaagaggauaucgacgccguuaucgcuauuggagugcugauccggggcgccacgccgcacuucgauuauauugcgucugaagucagcaagggccuugccgaccugucccucgagcugcgcaaacccaucaccuuuggggugauuacagcugauacccuggaacaagccaucgagagagcuggaacaaagcauggcaauaaagggugggaggccgcgcucucugccauugaaauggcuaaccuguucaagagccuucggggaggcuccgggggaucuggcggcagcgggggauccggcgggggacaguacaucaaggccaauagcaaauuuaucggcauuaccgagcuggggucuggauccggcgcucagacacgcuaugccccuguuaacuggggccacggggaaaucaaugacagcaccacgguggagcccaugcucgauggaccuuaccagcccaccacauucaccccuccgaacgacuauuggauucugaucaauucuaacacaaauggcgucguguacgaauccaccaacaauagcgauuuuuggacggccguggucgcuauugagccccauguuaacccuguggacagacaauauacaaucuucggggagucuaagcaguuuaauguguccaacgauagcaauaaauggaaguuccuugaaauguuucgguccucuagccagaacgaguucuacaaccgcagaacccugacauccgacacccgguuugucggaauccucaaauacggcgggcgcguguggaccuuccacggcgaaacacccagagcgacgaccgacucuagcuccacagccaaucugaacaauauuagcaucaccauucacucugaguucuauaucauuccucggagccaggaauccaagugcaacgaguacaucaauaacggacugugaggacuaguuauaagacugacuagcccgaugggccucccaacgggcccuccuccccuccuugcaccgagauuaaucaaaggcucuuuucagagccaccaaaaaaaaaaaaaaaaaaaaaaaaaaaaaaaaaaaaaaaaaaaaaaaaaaaaaaaaaaaaaaaaaaaaaaaaaaaaaaaaaaaaaaaaaaaaaaaaaaaaa

SEQ ID NO: 1720 - RNA, 807 nt, Artificial Sequence
  mRNA product Design i-3 (hSL-A100) comprising derived and/or modified sequence from RVA/BE1058/P[4]__AEX30665.1__SP-IgE_P2_VP8*(65-223) (opt5)
aggagaaagcuuaccauggacuggaccuggauccuguuccucguggccgcugccacaagaguccacagccaguacauuaaggcgaacuccaaauuuaucggcauuacggagcuggggucuggaagcggccuugaugggcccuaucaaccuaccacauucaagccgcccaaugacuacuggcugcucaucuccucuaacaccgauggaguuguguaugaaagcacaaauaacuccgacuuuuggaccgcugugauugccgucgagccucaugugaaucagacaaaccggcaguacguucuguucggcgaaaauaaacaguuuaacaucgaaaauucuagcgauaaguggaaauucuuugagauguucaaggggaacucccaaagcgacuuuucuaaucgcagaacccuuacguccagcaaccggcuggugggaaugcucaaguauggcggccgcgucuggaccuuccacggggagacacccagagccaccacagauucuuccagcaccgcugaccugaauaacaucucuauuaucauucauuccgaguuuuacaucauuccucggagccaggaauccaaaugcaaugaguauaucaacaacggacugugaggacuaguuauaagacugacuagcccgaugggccucccaacgggcccuccuccccuccuugcaccgagauuaaucaaaggcucuuuucagagccaccaaaaaaaaaaaaaaaaaaaaaaaaaaaaaaaaaaaaaaaaaaaaaaaaaaaaaaaaaaaaaaaaaaaaaaaaaaaaaaaaaaaaaaaaaaaaaaaaaaaaa

SEQ ID NO: 1721 - RNA, 807 nt, Artificial Sequence
  mRNA product Design i-3 (hSL-A100) comprising derived and/or modified sequence from RVA/DS-1/P[4]__CAD62680.1__SP-IgE_P2_VP8*(65-223) (opt5)
aggagaaagcuuaccauggacuggaccuggauccuguuccucguggccgcugccacaagaguccacagccaguacauuaaggcgaacuccaaauuuaucggcauuacggagcuggggucuggaagcggccuugaugggcccuaucaaccuaccacauucaagccgcccaaugacuacuggcugcucaucuccucuaacaccaauggaguuguguaugaaagcacaaacaauaacgauuuuuggaccgcuguguccucugucgagccucaugugagccagacaaaucggcaguacauucuguucggcgaaaacaaacaguuuaauguugagaacaauuccgacaaguggaaauucuuugaaaccuucacggggagcucucaaggaaacuuuuccaaucgcagaacccuuacaagcucuaaccggcuggugggcaugcucaaguauggcgggcgcgucuggaccuuccacggagagacacccagagccaccacggauuccagcaauacagccgaccugaacaacaucucuaucauuauccauuccgaguuuuacauuaucccucggagccaggaauccaagugcaaugaguauauuaacaauggccugugaggacuaguuauaagacugacuagcccgaugggccucccaacgggcccuccuccccuccuugcaccgagauuaaucaaaggcucuuuucagagccaccaaaaaaaaaaaaaaaaaaaaaaaaaaaaaaaaaaaaaaaaaaaaaaaaaaaaaaaaaaaaaaaaaaaaaaaaaaaaaaaaaaaaaaaaaaaaaaaaaaaaa

SEQ ID NO: 1722 - RNA, 807 nt, Artificial Sequence; identical to SEQ ID NO: 1721
  mRNA product Design i-3 (hSL-A100) comprising derived and/or modified sequence from RVA/DS-1/P[4]__ABV53252.1__SP-IgE_P2_VP8*(65-223) (opt5)

SEQ ID NO: 1723 - RNA, 807 nt, Artificial Sequence
  mRNA product Design i-3 (hSL-A100) comprising derived and/or modified sequence from RVA/F01322/P[6]__AFA51886.1__SP-IgE_P2_VP8*(65-223) (opt5)
aggagaaagcuuaccauggacuggaccuggauccuguuccucguggccgcugccacaagaguccacagccaguacauuaaggcgaacuccaaauuuaucggcauuacggagcuggggucuggaagcggccuugaugggcccuaucaaccuaccaauuucaagccgcccaacgacuacuggauccugcucaauccuacaaaccagcagguugugcuggaaggaaccaauaaaacagauauuuggguggcccuucugcucgucgagcccaacgugaccaaucagucccggcaauauacacuguuuggcgaaaccaagcagaucacgguugagaacaauaccaacaaauggaaguucuuugaaauguuccgcucuagcguguccgcugaguuucagcauaagagaacacugaccucugacacaaaacucgccggguucaugaaguuuuacaauagcgucuggaccuuccacggagagacgccuaacgcuacaaccgauuauuccagcacaucuaaucuguuugaaguggagaccguuauccauguggaguucuacauuaucccccggucccaggaaagcaaaugcucugaguauauuaacaccggccuuugaggacuaguuauaagacugacuagcccgaugggccucccaacgggcccuccuccccuccuugcaccgagauuaaucaaaggcucuuuucagagccaccaaaaaaaaaaaaaaaaaaaaaaaaaaaaaaaaaaaaaaaaaaaaaaaaaaaaaaaaaaaaaaaaaaaaaaaaaaaaaaaaaaaaaaaaaaaaaaaaaaaaa

SEQ ID NO: 1724 - RNA, 807 nt, Artificial Sequence
  mRNA product Design i-3 (hSL-A100) comprising derived and/or modified sequence from RVA/1076/P[6]__AAA47337.1__SP-IgE_P2_VP8*(65-223) (opt5)
aggagaaagcuuaccauggacuggaccuggauccuguuccucguggccgcugccacaagaguccacagccaguacauuaaggcgaacuccaaauuuaucggcauuacggagcuggggucuggaagcggccuugaugggcccuaucaaccuaccuccuucaagccgcccucugacuacuggauccugcucaauccuacaaaccagcagguugugcuggaaggaaccaauaaaacagauauuuggguggcccuucugcucgucgagcccaacgugaccaaucagagccggcaauauacacuguuuggcgaaaccaagcagaucacgguugagaacaauaccaacaaauggaaguucuuugaaauguuccgcuccucugugagcgcugaguuucagcauaagagaacacugaccuccgacacaaaacucgccggguuccugaaguuuuacaauagcgucuggaccuucuauggagagacgccucacgcuacaaccgauuacucuuccacaagcaaccuuucugaaguggagaccgccauccauguugaauuuuauauuaucccccggucccaggagagcaaaugcaaugaguacauuaacaccggccugugaggacuaguuauaagacugacuagcccgaugggccucccaacgggcccuccuccccuccuugcaccgagauuaaucaaaggcucuuuucagagccaccaaaaaaaaaaaaaaaaaaaaaaaaaaaaaaaaaaaaaaaaaaaaaaaaaaaaaaaaaaaaaaaaaaaaaaaaaaaaaaaaaaaaaaaaaaaaaaaaaaaaa

SEQ ID NO: 1725 - RNA, 807 nt, Artificial Sequence
  mRNA product Design i-3 (hSL-A100) comprising derived and/or modified sequence from RVA/BE1128/P[8]__AEX30671.1__SP-IgE_P2_VP8*(65-223) (opt5)
aggagaaagcuuaccauggacuggaccuggauccuguuccucguggccgcugccacaagaguccacagccaguacauuaaggcgaacuccaaauuuaucggcauuacggagcuggggucuggaagcggccuugaugggcccuaucaaccuaccacauucaccccgcccacagacuacuggauccugauuaccuccaauacaaacggaguuguguaugaaucuaccaauaacagcgauuuuuggacggcugugaucgccgucgagccucaugugaaucccguugaccggcaguacaacguguucggcgaaaauaagcaguuuaacguccgcaaugauuccgacaaauggaaguuccucgagauguuuagagggucuagccagaacgauuucuauaaucggcgcacccugacauccgacaccagacuugugggaauccugaaauacggcggccggguuuggacauuucacggggaaaccccucgcgccacgacagauagcucuaacaccgcuaaucucgacggaauuuccaucacaauucauagcgaguucuauaucauucccagaucucaagaguccaagugcaacgaauacaucaauaacggccugugaggacuaguuauaagacugacuagcccgaugggccucccaacgggcccuccuccccuccuugcaccgagauuaaucaaaggcucuuuucagagccaccaaaaaaaaaaaaaaaaaaaaaaaaaaaaaaaaaaaaaaaaaaaaaaaaaaaaaaaaaaaaaaaaaaaaaaaaaaaaaaaaaaaaaaaaaaaaaaaaaaaaa

SEQ ID NO: 1726 - RNA, 807 nt, Artificial Sequence
  mRNA product Design i-3 (hSL-A100) comprising derived and/or modified sequence from RVA/Wa-VirWa/P[8]__ACR22783.1__SP-IgE_P2_VP8*(65-223) (opt5)
aggagaaagcuuaccauggacuggaccuggauccuguuccucguggccgcugccacaagaguccacagccaguacauuaaggcgaacuccaaauuuaucggcauuacggagcuggggucuggaagcggccuugaugggcccuaucaaccuaccacauucaccccgcccaaugacuacuggauccugauuaacuccaauacaaacggaguuguguaugaaucuaccaauaacagcgauuuuuggacagcuguggucgccaucgagccucaugugaaucccguugaccggcaguacaccaucuucggcgaauccaagcaguuuaacgugcgcaaugauucuaacaaauggaaguuccucgagauguuuagaagcuccagccagaaugaguucuauaaccggcgcacgcugaccucugacacaagacuugucgggauucugaaauacggaggccggguguggaccuuucacggcgaaacaccucgcgccaccacggauuccagcucuacagcuaaucucaacaauaucuccauuaccauccauagcgaguucuauauuauccccagaucucaagaauccaagugcaacgaguacauuaacaaugggcugugaggacuaguuauaagacugacuagcccgaugggccucccaacgggcccuccuccccuccuugcaccgagauuaaucaaaggcucuuuucagagccaccaaaaaaaaaaaaaaaaaaaaaaaaaaaaaaaaaaaaaaaaaaaaaaaaaaaaaaaaaaaaaaaaaaaaaaaaaaaaaaaaaaaaaaaaaaaaaaaaaaaaa

SEQ ID NO: 1727 - RNA, 807 nt, Artificial Sequence
  mRNA product Design i-3 (hSL-A100) comprising derived and/or modified sequence from RVA/Wa/P[8]__AAA47290.1__SP-IgE_P2_VP8*(65-223) (opt5)
aggagaaagcuuaccauggacuggaccuggauccuguuccucguggccgcugccacaagaguccacagccaguacauuaaggcgaacuccaaauuuaucggcauuacggagcuggggucuggaagcggccuugaugggcccuaucaaccuaccacauucaccccgcccaaugacuacuggauccugauuaacuccaauacaaacggaguuguguaugaaucuaccaauaacagcgauuuuuggacagcuguggucgccaucgagccucaugugaaucccguugaccggcaguacaccaucuucggcgaauccaagcaguuuaacgugucuaaugauagcaacaaauggaaguuccucgagauguuucgcuccagcucucagaaugaguucuauaacagacggacgcugaccuccgacacacgcuuugucgggauucuuaaauacggaggcagaguguggaccuuccacggcgaaacaccucgggccaccacggauucuagcuccacagcuaaucugaacaauaucagcauuaccauccauucugaguuuuauauuaucccccgcucccaagaaagcaagugcaacgaguacauuaacaaugggcucugaggacuaguuauaagacugacuagcccgaugggccucccaacgggcccuccuccccuccuugcaccgagauuaaucaaaggcucuuuucagagccaccaaaaaaaaaaaaaaaaaaaaaaaaaaaaaaaaaaaaaaaaaaaaaaaaaaaaaaaaaaaaaaaaaaaaaaaaaaaaaaaaaaaaaaaaaaaaaaaaaaaaa

SEQ ID NO: 1728 - RNA, 807 nt, Artificial Sequence; identical to SEQ ID NO: 1727
  mRNA product Design i-3 (hSL-A100) comprising derived and/or modified sequence from RVA/Wa/P[8]__AAA66953.1__SP-IgE_P2_VP8*(65-223) (opt5)

SEQ ID NO: 1729 - RNA, 879 nt, Artificial Sequence
  mRNA product Design i-3 (hSL-A100) comprising derived and/or modified sequence from RVA/BE1058/P[4]__AEX30665.1__SP-IgE_P2_VP8*(41-223) (opt5)
aggagaaagcuuaccauggacuggaccuggauccuguuccucguggccgcugccacaagaguccacagccaguacauuaaggcgaacuccaaauuuaucggcauuacggagcuggggucuggaagcggcgcucaaacccgguaugcccccguuaauugggggcauggagaaaucaacgauuccacaaccguggagccugugcuugacggcccguaccagcccacaaccuucaagccucccaaugauuauuggcugcucauuucuagcaacacagacggggucguguacgaauccaccaauaacucugauuuuuggacggccguuaucgcuguggagccucacgucaaucagaccaaccgccaguaugugcuguucggagaaaauaaacaauuuaacaucgagaauagcuccgacaaguggaaauucuuugagauguucaagggcaacagccagucugauuuuuccaauagacggacacuuaccagcucuaaccgccugguuggcaugcucaaguacgggggaagaguguggacauuccauggcgaaacgccccgggccaccacagacuccagcucuaccgcugaucugaauaacauuuccaucauuauccacagcgaguuuuauauuaucccucgcucccaggaaucuaaaugcaacgaguacauuaauaacgggcugugaggacuaguuauaagacugacuagcccgaugggccucccaacgggcccuccuccccuccuugcaccgagauuaaucaaaggcucuuuucagagccaccaaaaaaaaaaaaaaaaaaaaaaaaaaaaaaaaaaaaaaaaaaaaaaaaaaaaaaaaaaaaaaaaaaaaaaaaaaaaaaaaaaaaaaaaaaaaaaaaaaaaa

SEQ ID NO: 1730 - RNA, 879 nt, Artificial Sequence
  mRNA product Design i-3 (hSL-A100) comprising derived and/or modified sequence from RVA/DS-1/P[4]__CAD62680.1__SP-IgE_P2_VP8*(41-223) (opt5)
aggagaaagcuuaccauggacuggaccuggauccuguuccucguggccgcugccacaagaguccacagccaguacauuaaggcgaacuccaaauuuaucggcauuacggagcuggggucuggaagcggcgcucaaacccgguaugcccccguuaauuggggguccugggaaaucaacgauucuacaaccguggagccugugcuugacggaccguaccagcccacaaccuucaagccucccaaugauuauuggcugcucauuagcuccaacacaaauggcgucguguacgaaucuaccaacaauaacgacuuuuggacggccguuagcuccguggagccucaugucagccagaccaaucgccaguauauccuguucggggaaaacaaacaauuuaauguggagaacaauucugauaaguggaaauucuuugagacauucaccggauccagccagggcaacuuuucuaauagacggacacuuaccuccagcaaccgccugguuggcaugcucaaguacgggggaagaguguggacguuccacggcgaaacaccccgggcuaccacagacucuuccaacaccgccgaucugaauaacaucagcauuaucauucauuccgaguuuuauaucauuccucgcucucaggaaagcaagugcaaugaguacaucaacaaugggcugugaggacuaguuauaagacugacuagcccgaugggccucccaacgggcccuccuccccuccuugcaccgagauuaaucaaaggcucuuuucagagccaccaaaaaaaaaaaaaaaaaaaaaaaaaaaaaaaaaaaaaaaaaaaaaaaaaaaaaaaaaaaaaaaaaaaaaaaaaaaaaaaaaaaaaaaaaaaaaaaaaaaaa

SEQ ID NO: 1731 - RNA, 879 nt, Artificial Sequence; identical to SEQ ID NO: 1730
  mRNA product Design i-3 (hSL-A100) comprising derived and/or modified sequence from RVA/DS-1/P[4]__ABV53252.1__SP-IgE_P2_VP8*(41-223) (opt5)

SEQ ID NO: 1732 - RNA, 879 nt, Artificial Sequence
  mRNA product Design i-3 (hSL-A100) comprising derived and/or modified sequence from RVA/F01322/P[6]__AFA51886.1__SP-IgE_P2_VP8*(41-223) (opt5)
aggagaaagcuuaccauggacuggaccuggauccuguuccucguggccgcugccacaagaguccacagccaguacauuaaggcgaacuccaaauuuaucggcauuacggagcuggggucuggaagcggcgcucaaaccaauuaugcccccguuacauggucccauggggaagugaacgauucuaccacaaucgagccugugcuugacggaccguaccagcccaccaauuucaagccucccaacgauuauuggauucugcucaauccuacaaaccagcaggucgugcuggaaggcaccaauaaaacggacaucuggguugcccuucugcucguggagcccaacgucaccaaucaaagccggcaguacacacuguuuggggaaaccaagcagaucacaguggagaacaauaccaacaaauggaaguucuuugagauguuccgcuccucuguuagcgcugaauuucagcacaagagaacgcugacauccgauaccaaacucgccggauucaugaaguuuuauaauagcguguggacauuccauggcgagaccccuaacgcuaccacagacuacucuuccacgagcaaucuguuugaagucgagaccgugauucacguggaguucuauaucauuccgcggucucaagaauccaaaugcagcgaguacaucaacacaggccuuugaggacuaguuauaagacugacuagcccgaugggccucccaacgggcccuccuccccuccuugcaccgagauuaaucaaaggcucuuuucagagccaccaaaaaaaaaaaaaaaaaaaaaaaaaaaaaaaaaaaaaaaaaaaaaaaaaaaaaaaaaaaaaaaaaaaaaaaaaaaaaaaaaaaaaaaaaaaaaaaaaaaaa

SEQ ID NO: 1733 - RNA, 879 nt, Artificial Sequence
  mRNA product Design i-3 (hSL-A100) comprising derived and/or modified sequence from RVA/1076/P[6]__AAA47337.1__SP-IgE_P2_VP8*(41-223) (opt5)
aggagaaagcuuaccauggacuggaccuggauccuguuccucguggccgcugccacaagaguccacagccaguacauuaaggcgaacuccaaauuuaucggcauuacggagcuggggucuggaagcggcgcucaaaccaauuaugcccccguuacauggucccauggggaagugaacgauucuaccacaaucgagccugugcuugacggaccguaccagcccaccagcuucaagccucccuccgauuauuggauucugcucaauccuacaaaccagcaggucgugcuggaaggcaccaauaaaacggacaucuggguugcccuucugcucguggagcccaacgucaccaaucaaucucggcaguacacacuguuuggggaaaccaagcagaucacaguggagaacaauaccaacaaauggaaguucuuugagauguuccgcagcuccguuagcgcugaauuucagcacaagagaacgcugacaucugauaccaaacucgccggauuccugaaguuuuauaauuccguguggacauucuacggcgagaccccucaugcuaccacagacuauagcucuacguccaaccuuagcgaagucgagaccgccauucacguggaguuuuacaucauuccgcggucucaagaauccaaaugcaaugaguacaucaacacaggccugugaggacuaguuauaagacugacuagcccgaugggccucccaacgggcccuccuccccuccuugcaccgagauuaaucaaaggcucuuuucagagccaccaaaaaaaaaaaaaaaaaaaaaaaaaaaaaaaaaaaaaaaaaaaaaaaaaaaaaaaaaaaaaaaaaaaaaaaaaaaaaaaaaaaaaaaaaaaaaaaaaaaaa

SEQ ID NO: 1734 - RNA, 879 nt, Artificial Sequence
  mRNA product Design i-3 (hSL-A100) comprising derived and/or modified sequence from RVA/BE1128/P[8]__AEX30671.1__SP-IgE_P2_VP8*(41-223) (opt5)
aggagaaagcuuaccauggacuggaccuggauccuguuccucguggccgcugccacaagaguccacagccaguacauuaaggcgaacuccaaauuuaucggcauuacggagcuggggucuggaagcggcgcucaaacccgguaugcccccguuaauugggggcauggagaaaucaacgauuccacaaccguggagccuauucuugacggcccguaccagcccacaaccuucacaccucccaccgauuauuggauccugaucacgucuaauaccaacgggguggucuacgaaagcacaaauaacuccgacuuuuggaccgccgugauugcuguugagccucacgugaaucccgucgaucgccaguauaacguguucggagaaaauaagcaguuuaacguuagaaaugacucugauaaauggaaguuccucgagauguuucggggcagcucccaaaacgacuucuacaaucgcagaacacugaccagcgauacgcggcuugugggcauccugaaauaugggggacgcgucuggacauuucauggcgagaccccuagagccacaaccgacucuuccaacaccgcuaaucucgaugggauuagcaucacaauucacucugaguucuacaucauuccgcggucccaggaaagcaagugcaacgaauacaucaacaauggacugugaggacuaguuauaagacugacuagcccgaugggccucccaacgggcccuccuccccuccuugcaccgagauuaaucaaaggcucuuuucagagccaccaaaaaaaaaaaaaaaaaaaaaaaaaaaaaaaaaaaaaaaaaaaaaaaaaaaaaaaaaaaaaaaaaaaaaaaaaaaaaaaaaaaaaaaaaaaaaaaaaaaaa

SEQ ID NO: 1735 - RNA, 879 nt, Artificial Sequence
  mRNA product Design i-3 (hSL-A100) comprising derived and/or modified sequence from RVA/Wa-VirWa/P[8]__ACR22783.1__SP-IgE_P2_VP8*(41-223) (opt5)
aggagaaagcuuaccauggacuggaccuggauccuguuccucguggccgcugccacaagaguccacagccaguacauuaaggcgaacuccaaauuuaucggcauuacggagcuggggucuggaagcggcgcucaaacccgguaugcccccguuaauugggggcauggagaaaucaacgauuccacaaccguggagccuauucuugacggcccguaccagcccacaaccuucacaccucccaaugauuauuggauccugaucaacucuaauaccaacgggguggucuacgaaagcacgaauaacuccgacuuuuggaccgccgugguugcuauugagccucacgugaaucccgucgaucgccaguauacaaucuucggagaaucuaagcaguuuaacgugagaaaugacagcaacaaauggaaguuccucgagauguuucgguccagcucucaaaaugaguucuacaaccgcagaacccugacauccgauacccggcuuguuggcauucugaaauauggcgggcgcguguggacguuucauggagaaacaccuagagccaccacagacucuagcuccaccgcuaaucucaacaacaucagcauuaccauccacucugaguucuacauuaucccgcggucccaggaaagcaagugcaaugaguacaucaacaauggccugugaggacuaguuauaagacugacuagcccgaugggccucccaacgggcccuccuccccuccuugcaccgagauuaaucaaaggcucuuuucagagccaccaaaaaaaaaaaaaaaaaaaaaaaaaaaaaaaaaaaaaaaaaaaaaaaaaaaaaaaaaaaaaaaaaaaaaaaaaaaaaaaaaaaaaaaaaaaaaaaaaaaaa

SEQ ID NO: 1736 - RNA, 879 nt, Artificial Sequence
  mRNA product Design i-3 (hSL-A100) comprising derived and/or modified sequence from RVA/Wa/P[8]__AAA47290.1__SP-IgE_P2_VP8*(41-223) (opt5)
aggagaaagcuuaccauggacuggaccuggauccuguuccucguggccgcugccacaagaguccacagccaguacauuaaggcgaacuccaaauuuaucggcauuacggagcuggggucuggaagcggcgcucaaacccgguaugcccccguuaauugggggcauggagaaaucaacgauuccacaaccguggagccuauucuugacggcccguaccagcccacaaccuucacaccucccaaugauuauuggauccugaucaacucuaauaccaacgggguggucuacgaaagcacgaauaacuccgacuuuuggaccgccgugguugcuauugagccucacgugaaucccgucgaucgccaguauacaaucuucggagaaucuaagcaguuuaacgugagcaaugacuccaacaaauggaaguuccucgagauguuuagaucuagcucccaaaaugaguucuacaaccggcgcacccugacaagcgauaccagauuuguuggcauucuuaaauauggcgggcggguguggacguuccauggagaaacaccucgcgccaccacagacucuuccagcaccgcuaaucugaacaacaucucuauuaccauccacuccgaguuuuacauuaucccgagaagccaggaauccaagugcaaugaguacaucaacaauggccucugaggacuaguuauaagacugacuagcccgaugggccucccaacgggcccuccuccccuccuugcaccgagauuaaucaaaggcucuuuucagagccaccaaaaaaaaaaaaaaaaaaaaaaaaaaaaaaaaaaaaaaaaaaaaaaaaaaaaaaaaaaaaaaaaaaaaaaaaaaaaaaaaaaaaaaaaaaaaaaaaaaaaa

SEQ ID NO: 1737 - RNA, 879 nt, Artificial Sequence
  mRNA product Design i-3 (hSL-A100) comprising derived and/or modified sequence from RVA/Wa/P[8]__AAA66953.1__SP-IgE_P2_VP8*(41-223) (opt5)
aggagaaagcuuaccauggacuggaccuggauccuguuccucguggccgcugccacaagaguccacagccaguacauuaaggcgaacuccaaauuuaucggcauuacggagcuggggucuggaagcggcgcucaaacccgguaugcccccguuaauugggggcauggagaaaucaacgauuccacaaccguggagccuaugcuugacggcccguaccagcccacaaccuucacaccucccaaugauuauuggauucugaucaacucuaauaccaacgggguggucuacgaaagcacgaauaacuccgacuuuuggaccgccgugguugcuaucgagccucacgugaaucccgucgaucgccaguauacaauuuucggagaaucuaagcaguuuaacgugagcaaugacuccaacaaauggaaguuccucgagauguuuagaucuagcucccaaaaugaguucuacaaccggcgcacccugacaagcgauaccagauuuguuggcauccuuaaauauggcgggcggguguggacguuccauggagaaacaccucgcgccaccacagacucuuccagcaccgcuaaucugaacaacauuucuaucaccauucacuccgaguuuuacaucauuccgagaagccaggaauccaagugcaaugaguacaucaacaauggccucugaggacuaguuauaagacugacuagcccgaugggccucccaacgggcccuccuccccuccuugcaccgagauuaaucaaaggcucuuuucagagccaccaaaaaaaaaaaaaaaaaaaaaaaaaaaaaaaaaaaaaaaaaaaaaaaaaaaaaaaaaaaaaaaaaaaaaaaaaaaaaaaaaaaaaaaaaaaaaaaaaaaaa

SEQ ID NO: 1738 - protein, 18 aa, Artificial Sequence
  derived and/or modified protein sequence (wt) from Homo sapiens__AAB59424.1__signal peptide_IgE (SP-IgE)
MDWTWILFLVAAATRVHS

SEQ ID NO: 1739 - protein, 22 aa, Artificial Sequence
  derived and/or modified protein sequence (wt) from Homo sapiens__AAA61213.1__signal peptide_HsPLAT
MDAMKRGLCCVLLLCGAVFVSP

SEQ ID NO: 1740 - protein, 18 aa, Artificial Sequence
  derived and/or modified protein sequence (wt) from Homo sapiens__NP_000468.1__signal peptide_HsALB
MKWVTFISLLFLFSSAYS

SEQ ID NO: 1741 - RNA, 54 nt, Artificial Sequence
  derived and/or modified CDS sequence (opt1) from Homo sapiens__AAB59424.1__signal peptide_IgE (SP-IgE)
auggacuggaccuggauccuguuccucguggccgccgcgacccgcguccacagc

SEQ ID NO: 1742 - RNA, 66 nt, Artificial Sequence
  derived and/or modified CDS sequence (opt1) from Homo sapiens__AAA61213.1__signal peptide_HsPLAT
auggacgccaugaagcgcggccugugcugcgugcuccugcugugcggggccgucuucgugagcccc

SEQ ID NO: 1743 - RNA, 54 nt, Artificial Sequence
  derived and/or modified CDS sequence (opt1) from Homo sapiens__NP_000468.1__signal peptide_HsALB
augaagugggugaccuucaucagccugcucuuccuguucuccagcgccuacucc

SEQ ID NO: 1744 - RNA, 54 nt, Artificial Sequence
  derived and/or modified CDS sequence (opt4) from Homo sapiens__AAB59424.1__signal peptide_IgE (SP-IgE)
auggacuggaccuggauccuguuccugguggccgccgccaccagagugcacagc

SEQ ID NO: 1745 - RNA, 66 nt, Artificial Sequence
  derived and/or modified CDS sequence (opt4) from Homo sapiens__AAA61213.1__signal peptide_HsPLAT
auggacgccaugaagagaggccugugcugcgugcugcugcugugcggcgccguguucgugagcccc

SEQ ID NO: 1746 - RNA, 54 nt, Artificial Sequence
  derived and/or modified CDS sequence (opt4) from Homo sapiens__NP_000468.1__signal peptide_HsALB
augaagugggugaccuucaucagccugcuguuccuguucagcagcgccuacagc

SEQ ID NO: 1747 - RNA, 54 nt, Artificial Sequence
  derived and/or modified CDS sequence (opt5) from Homo sapiens__AAB59424.1__signal peptide_IgE (SP-IgE)
auggacuggaccuggauccuguuccucguggccgcugccacaagaguccacagc

SEQ ID NO: 1748 - RNA, 66 nt, Artificial Sequence
  derived and/or modified CDS sequence (opt5) from Homo sapiens__AAA61213.1__signal peptide_HsPLAT
auggacgccaugaagagaggccugugcugugugcuccugcuuugcggggcugucuucguuagcccc

SEQ ID NO: 1749 - RNA, 54 nt, Artificial Sequence
  derived and/or modified CDS sequence (opt5) from Homo sapiens__NP_000468.1__signal peptide_HsALB
augaagugggugaccuucaucagccugcucuuucuguucuccucugccuacagc

SEQ ID NO: 1750 - protein, 15 aa, Artificial Sequence
  derived and/or modified protein sequence (wt) from Clostridium tetani/E88__WP_023439719.1__P2 helper peptide (P2)
QYIKANSKFIGITEL

SEQ ID NO: 1751 - RNA, 45 nt, Artificial Sequence
  derived and/or modified CDS sequence (opt1) from Clostridium tetani/E88__WP_023439719.1__P2 helper peptide (P2)
caguacaucaaggccaacagcaaguucaucggcaucaccgagcug

SEQ ID NO: 1752 - RNA, 45 nt, Artificial Sequence; identical to SEQ ID NO: 1751
  derived and/or modified CDS sequence (opt4) from Clostridium tetani/E88__WP_023439719.1__P2 helper peptide (P2)

SEQ ID NO: 1753 - RNA, 45 nt, Artificial Sequence
  derived and/or modified CDS sequence (opt5) from Clostridium tetani/E88__WP_023439719.1__P2 helper peptide (P2)
caguacaucaaggccaacagcaaauucauuggcaucaccgagcug

SEQ ID NO: 1754 - protein, 13 aa, Artificial Sequence
  derived and/or modified protein sequence (artificial) from Artificial____PADRE helper epitope
AKFVAAWTLKAAA

SEQ ID NO: 1755 - RNA, 39 nt, Artificial Sequence
  derived and/or modified CDS sequence (opt1) from Artificial____PADRE helper epitope
gccaaguucguggccgccuggacccugaaggcggccgcc

SEQ ID NO: 1756 - RNA, 39 nt, Artificial Sequence
  derived and/or modified CDS sequence (opt1) from Artificial____PADRE helper epitope
gccaaguucguggccgcguggacccugaaggccgccgcc

SEQ ID NO: 1757 - RNA, 39 nt, Artificial Sequence
  derived and/or modified CDS sequence (opt4) from Artificial____PADRE helper epitope
gccaaguucguggccgccuggacccugaaggccgccgcc

SEQ ID NO: 1758 - RNA, 39 nt, Artificial Sequence
  derived and/or modified CDS sequence (opt5) from Artificial____PADRE helper epitope
gccaaguucguggcugccuggacccugaaagcggcugcc

SEQ ID NO: 1759 - protein, 154 aa, Artificial Sequence
  derived and/or modified protein sequence (artificial) from Aquifex aeolicus____lumazine synthase (LumSynt)
MQIYEGKLTAEGLRFGIVASRFNHALVDRLVEGAIDAIVRHGGREEDITLVRVPGSWEIPVAAGELARKEDIDAVIAIGVLIRGATPHFDYIASEVSKGLADLSLELRKPITFGVITADTLEQAIERAGTKHGNKGWEAALSAIEMANLFKSLR

SEQ ID NO: 1760 - RNA, 462 nt, Artificial Sequence
  derived and/or modified CDS sequence (opt1) from Aquifex aeolicus/VF5____lumazine synthase (LumSynt)
augcagaucuacgagggcaagcugaccgccgaggggcuccgcuucggcaucguggccagccgguucaaccacgcgcuggucgaccgccugguggagggggccaucgacgccaucgugcggcacggcgggcgcgaggaggacaucacccucguccgggugcccggcuccugggagaucccgguggccgccggcgagcuggcccgcaaggaggacaucgacgcggucaucgccaucggggugcugauccggggcgccacgccccacuucgacuacaucgccagcgagguguccaaggggcucgcggaccugagccuggagcuccgcaagcccaucaccuucggcgucaucaccgccgacacccuggagcaggccaucgagcgggccgggacgaagcacggcaacaagggcugggaggccgcgcuguccgccaucgagauggccaaccucuucaagagccugcgc

SEQ ID NO: 1761 - RNA, 462 nt, Artificial Sequence
  derived and/or modified CDS sequence (opt1) from Aquifex aeolicus/VF5____lumazine synthase (LumSynt)
augcagaucuacgagggcaagcugaccgccgaggggcuccgcuucggcaucguggccagccgguucaaccacgcgcuggucgaccgccugguggagggggccaucgacgccaucgugcggcacggcgggcgcgaggaggacaucacccucguccgggugcccggcuccugggagaucccgguggccgccggcgagcuggcgcgcaaggaggacaucgacgccgucaucgccaucggggugcugauccggggcgccacgccccacuucgacuacaucgcgagcgagguguccaaggggcucgccgaccugagccuggagcuccgcaagcccaucaccuucggcgucaucaccgccgacacccuggagcaggccaucgagcgggccgggacgaagcacggcaacaagggcugggaggcggcccuguccgccaucgagauggccaaccucuucaagagccugcgc

SEQ ID NO: 1762 - RNA, 462 nt, Artificial Sequence
  derived and/or modified CDS sequence (opt4) from Aquifex aeolicus/VF5____lumazine synthase (LumSynt)
augcagaucuacgagggcaagcugaccgccgagggccugagauucggcaucguggccagcagauucaaccacgcccugguggacagacugguggagggcgccaucgacgccaucgugagacacggcggcagagaggaggacaucacccuggugagagugcccggcagcugggagauccccguggccgccggcgagcuggccagaaaggaggacaucgacgccgugaucgccaucggcgugcugaucagaggcgccaccccccacuucgacuacaucgccagcgaggugagcaagggccuggccgaccugagccuggagcugagaaagcccaucaccuucggcgugaucaccgccgacacccuggagcaggccaucgagagagccggcaccaagcacggcaacaagggcugggaggccgcccugagcgccaucgagauggccaaccuguucaagagccugaga

SEQ ID NO: 1763 - RNA, 462 nt, Artificial Sequence; identical to SEQ ID NO: 1762
  derived and/or modified CDS sequence (opt5) from Aquifex aeolicus/VF5____lumazine synthase (LumSynt)

SEQ ID NO: 1764 - protein, 163 aa, Artificial Sequence
  derived and/or modified protein sequence (artificial) from Helicobacter pylori____Ferritin
DIIKLLNEQVNKEMQSSNLYMSMSSWCYTHSLDGAGLFLFDHAAEEYEHAKKLIIFLNENNVPVQLTSISAPEHKFEGLTQIFQKAYEHEQHISESINNIVDHAIKSKDHATFNFLQWYVAEQHEEEVLFKDILDKIELIGNENHGLYLADQYVKGIAKSRKS

SEQ ID NO: 1765 - RNA, 489 nt, Artificial Sequence
  derived and/or modified CDS sequence (opt1) from Helicobacter pylori/J99____Ferritin
gacaucaucaagcuccugaacgagcaggugaacaaggagaugcaguccagcaaccuguacauguccaugagcuccuggugcuacacccacagccucgacggcgccgggcuguuccuguucgaccacgccgcggaggaguacgagcacgccaagaagcucaucaucuuccugaacgagaacaacguccccgugcagcugaccuccaucagcgccccggagcacaaguucgagggccucacgcagaucuuccagaaggccuacgagcacgagcagcacaucuccgagagcaucaacaacaucguggaccacgccaucaaguccaaggaccacgcgaccuucaacuuccugcagugguacgucgccgagcagcacgaggaggaggugcuguucaaggacauccucgacaagaucgagcugaucgggaacgagaaccacggccuguaccucgccgaccaguacgugaaggggaucgccaagagccgcaagucc

SEQ ID NO: 1766 - RNA, 489 nt, Artificial Sequence
  derived and/or modified CDS sequence (opt1) from Helicobacter pylori/J99____Ferritin
gacaucaucaagcugcucaacgagcaggucaacaaggagaugcagagcuccaaccuguacaugagcauguccagcuggugcuacacccacucccuggacggcgccggccucuuccuguucgaccacgccgcggaggaguacgagcacgccaagaagcugaucaucuuccucaacgagaacaacgugcccgugcagcugaccagcaucuccgccccggagcacaaguucgaggggcugacgcagaucuuccagaaggccuacgagcacgagcagcacaucagcgaguccaucaacaacaucguggaccacgccaucaagagcaaggaccacgcgaccuucaacuuccuccagugguacgucgccgagcagcacgaggaggaggugcuguucaaggacauccuggacaagaucgagcucaucgggaacgagaaccacggccuguaccuggccgaccaguacgugaaggggaucgccaagucccgcaagagc

SEQ ID NO: 1767 - RNA, 489 nt, Artificial Sequence
  derived and/or modified CDS sequence (opt4) from Helicobacter pylori/J99____Ferritin
gacaucaucaagcugcugaacgagcaggugaacaaggagaugcagagcagcaaccuguacaugagcaugagcagcuggugcuacacccacagccuggacggcgccggccuguuccuguucgaccacgccgccgaggaguacgagcacgccaagaagcugaucaucuuccugaacgagaacaacgugcccgugcagcugaccagcaucagcgcccccgagcacaaguucgagggccugacccagaucuuccagaaggccuacgagcacgagcagcacaucagcgagagcaucaacaacaucguggaccacgccaucaagagcaaggaccacgccaccuucaacuuccugcagugguacguggccgagcagcacgaggaggaggugcuguucaaggacauccuggacaagaucgagcugaucggcaacgagaaccacggccuguaccuggccgaccaguacgugaagggcaucgccaagagcagaaagagc

SEQ ID NO: 1768 - RNA, 489 nt, Artificial Sequence
  derived and/or modified CDS sequence (opt5) from Helicobacter pylori/J99____Ferritin
gacaucauuaagcugcucaacgaacaggugaauaaagagaugcaaagcuccaaccuguacaugucuaugagcuccuggugcuauacccacucucuugauggcgccgggcuguuccucuuugaccaugcugccgaggaauacgagcacgcgaagaaacugaucauuuuccuuaaugaaaacaauguccccguucagcugacaagcaucuccgcuccugagcauaaguuugagggacucacgcagauuuuccagaaagccuaugaacacgagcaacauaucucugaaagcaucaacaauauuguggaucacgccaucaaguccaaggaccacgcuaccuuuaacuuccugcagugguacguggccgagcagcaugaggaagagguccuguuuaaagauauucucgacaagaucgaacugauuggcaaugagaaccacgggcuuuaucuggcugaucaguacgugaaaggaaucgccaagagcagaaaaucu

SEQ ID NO: 1769 - protein, 5 aa, Artificial Sequence
  derived and/or modified protein sequence (artificial) from Artificial____peptide linker 3
GSGSG

SEQ ID NO: 1770 - protein, 15 aa, Artificial Sequence
  derived and/or modified protein sequence (artificial) from Artificial____peptide linker 6
GGSGGSGGSGGSGGG

SEQ ID NO: 1771 - protein, 3 aa, Artificial Sequence
  derived and/or modified protein sequence (artificial) from Artificial____peptide linker 9
SGG

SEQ ID NO: 1772 - RNA, 15 nt, Artificial Sequence
  derived and/or modified CDS sequence (opt1) from Artificial____peptide linker 3
ggcagcggguccggc

SEQ ID NO: 1773 - RNA, 45 nt, Artificial Sequence
  derived and/or modified CDS sequence (opt1) from Artificial____peptide linker 6
ggcgggagcggcggguccggcgggagcggcggcuccgggggcggg

SEQ ID NO: 1774 - RNA, 9 nt, Artificial Sequence
  derived and/or modified CDS sequence (opt1) from Artificial____peptide linker 9
agcggcggg

SEQ ID NO: 1775 - RNA, 15 nt, Artificial Sequence
  derived and/or modified CDS sequence (opt4) from Artificial____peptide linker 3
ggcagcggcagcggc

SEQ ID NO: 1776 - RNA, 45 nt, Artificial Sequence
  derived and/or modified CDS sequence (opt4) from Artificial____peptide linker 6
ggcggcagcggcggcagcggcggcagcggcggcagcggcggcggc

SEQ ID NO: 1777 - RNA, 9 nt, Artificial Sequence
  derived and/or modified CDS sequence (opt4) from Artificial____peptide linker 9
agcggcggc

SEQ ID NO: 1778 - RNA, 15 nt, Artificial Sequence
  derived and/or modified CDS sequence (opt5) from Artificial____peptide linker 3
ggcagcggguccgga

SEQ ID NO: 1779 - RNA, 45 nt, Artificial Sequence
  derived and/or modified CDS sequence (opt5) from Artificial____peptide linker 6
ggcgggagcggaggcuccgggggaucuggcgggagcggaggcggc

SEQ ID NO: 1780 - RNA, 9 nt, Artificial Sequence
  derived and/or modified CDS sequence (opt5) from Artificial____peptide linker 9
agcggcggg

SEQ ID NO: 1781 - DNA, 62 bp, Artificial Sequence
  5'-UTR of human peroxisomal multifunctional enzyme type 2 lacking the 5'-terminal oligopyrimidine tract (HSD17B4)
gtcccgcagtcggcgtccagcggctctgcttgttcgtgtgtgtgtcgttgcaggccttattc

SEQ ID NO: 1782 - RNA, 62 nt, Artificial Sequence
  5'-UTR of human peroxisomal multifunctional enzyme type 2 lacking the 5'-terminal oligopyrimidine tract (HSD17B4) mRNA
gucccgcagucggcguccagcggcucugcuuguucgugugugugucguugcaggccuuauuc

SEQ ID NO: 1783 - DNA, 42 bp, Artificial Sequence
  5'-UTR of human acid ceramidase lacking the 5'-terminal oligopyrimidine tract (ASAH1)
gcctctgctggagtccggggagtggcgttggctgctagagcg

SEQ ID NO: 1784 - RNA, 42 nt, Artificial Sequence
  5'-UTR of human acid ceramidase lacking the 5'-terminal oligopyrimidine tract (ASAH1) mRNA
gccucugcuggaguccggggaguggcguuggcugcuagagcg

SEQ ID NO: 1785 - DNA, 75 bp, Artificial Sequence
  5'-UTR of human mitochondrial ATP synthase subunit alpha lacking the 5'-terminal oligopyrimidine tract (ATP5A1)
gcggctcggccattttgtcccagtcagtccggaggctgcggctgcagaagtaccgcctgcggagtaactgcaaag

SEQ ID NO: 1786 - RNA, 75 nt, Artificial Sequence
  5'-UTR of human mitochondrial ATP synthase subunit alpha lacking the 5'-terminal oligopyrimidine tract (ATP5A1) mRNA
gcggcucggccauuuugucccagucaguccggaggcugcggcugcagaaguaccgccugcggaguaacugcaaag

SEQ ID NO: 1787 - DNA, 54 bp, Artificial Sequence
  5'-UTR of mouse RIKEN cDNA 2010107E04 gene (Mp68, 2010107E04Rik)
ctttcccattctgtagcagaatttggtgttgcctgtggtcttggtcccgcggag

SEQ ID NO: 1788 - RNA, 54 nt, Artificial Sequence
  5'-UTR of mouse RIKEN cDNA 2010107E04 gene (Mp68, 2010107E04Rik) mRNA
cuuucccauucuguagcagaauuugguguugccuguggucuuggucccgcggag

SEQ ID NO: 1789 - DNA, 81 bp, Artificial Sequence
  5'-UTR of mouse NADH dehydrogenase (ubiquinone) 1 alpha subcomplex, 4 (Ndufa4)
gtccgctcagccaggttgcagaagcggcttagcgtgtgtcctaatcttctctctgcgtgtaggtaggcctgtgccgcaaac

SEQ ID NO: 1790 - RNA, 81 nt, Artificial Sequence
  5'-UTR of mouse NADH dehydrogenase (ubiquinone) 1 alpha subcomplex, 4 (Ndufa4) mRNA
guccgcucagccagguugcagaagcggcuuagcguguguccuaaucuucucucugcguguagguaggccugugccgcaaac

SEQ ID NO: 1791 - DNA, 108 bp, Artificial Sequence
  5'-UTR of mouse nitric oxide synthase interacting protein (Nosip)
ctcctgtcgggcggaagtaggaggagtagagtttaaaaacagtactctttttccggttcgggacgtagttgaagcaacgacaagccggataaccgctcttgagacagg

SEQ ID NO: 1792 - RNA, 108 nt, Artificial Sequence
  5'-UTR of mouse nitric oxide synthase interacting protein (Nosip) mRNA
cuccugucgggcggaaguaggaggaguagaguuuaaaaacaguacucuuuuuccgguucgggacguaguugaagcaacgacaagccggauaaccgcucuugagacagg

SEQ ID NO: 1793 - DNA, 84 bp, Artificial Sequence
  5'-UTR of mouse ribosomal protein L31 (Rpl31)
cccgtgacccggaagttgtacggctacgcgactttccctcccacaaaccctcgcgcccttcctttcctacttgggcccggcaga

SEQ ID NO: 1794 - RNA, 84 nt, Artificial Sequence
  5'-UTR of mouse ribosomal protein L31 (Rpl31) mRNA
cccgugacccggaaguuguacggcuacgcgacuuucccucccacaaacccucgcgcccuuccuuuccuacuugggcccggcaga

SEQ ID NO: 1795 - DNA, 159 bp, Artificial Sequence
  5'-UTR of mouse solute carrier family 7 (cationic amino acid transporter, y+ system), member 3 (Slc7a3)
gggcgcttggcttgcaaggaccctgagctgcggcattgaagcacacccaacccaactcgactgaagtcagcctcactgaaccggatctgagaatcttctctctctgggcttgccagggctctccgaacctagctagcatcctcttcaattccaactaga

SEQ ID NO: 1796 - RNA, 159 nt, Artificial Sequence
  5'-UTR of mouse solute carrier family 7 (cationic amino acid transporter, y+ system), member 3 (Slc7a3) mRNA
gggcgcuuggcuugcaaggacccugagcugcggcauugaagcacacccaacccaacucgacugaagucagccucacugaaccggaucugagaaucuucucucucugggcuugccagggcucuccgaaccuagcuagcauccucuucaauuccaacuaga

SEQ ID NO: 1797 - DNA, 102 bp, Artificial Sequence
  5'-UTR of human tubulin beta 4B class Ivb (TUBB4B)
atataagcgttggcggagcgtcggttgtagcactctgcgcgcccgctcttctgctgctgtttgtctacttcctcctgcttccccgccgccgccgccgccatc

SEQ ID NO: 1798 - RNA, 102 nt, Artificial Sequence
  5'-UTR of human tubulin beta 4B class Ivb (TUBB4B) mRNA
auauaagcguuggcggagcgucgguuguagcacucugcgcgcccgcucuucugcugcuguuugucuacuuccuccugcuuccccgccgccgccgccgccauc

SEQ ID NO: 1799 - DNA, 222 bp, Artificial Sequence
  5'-UTR of mouse ubiquilin 2 (Ubqln2)
cggagacggcctgcaggacctgctctctcagccctcagccgaggcctacgccgagccgagtgcgcagccgacgaccgggaggagccgcagccttcaactctgaggtactgtgatccgcgctgcccgccgggccgccccagtccgctgctgcggcacctccttccctcgcgccctcttcgctcgccagcgccttccctgtgagcctgcgtcaccgcggccgcc

SEQ ID NO: 1800 - RNA, 222 nt, Artificial Sequence
  5'-UTR of mouse ubiquilin 2 (Ubqln2)  mRNA
cggagacggccugcaggaccugcucucucagcccucagccgaggccuacgccgagccgagugcgcagccgacgaccgggaggagccgcagccuucaacucugagguacugugauccgcgcugcccgccgggccgccccaguccgcugcugcggcaccuccuucccucgcgcccucuucgcucgccagcgccuucccugugagccugcgucaccgcggccgcc

SEQ ID NO: 1801 - DNA, 42 bp, Artificial Sequence
  5'-UTR of human ribosomal protein Large 32 lacking the 5'-terminal oligopyrimidine tract (RPL32, 32L4)
ggcgctgcctacggaggtggcagccatctccttctcggcatc

SEQ ID NO: 1802 - RNA, 42 nt, Artificial Sequence
  5'-UTR of human ribosomal protein Large 32 lacking the 5'-terminal oligopyrimidine tract (RPL32, 32L4) mRNA
ggcgcugccuacggagguggcagccaucuccuucucggcauc

SEQ ID NO: 1803 - DNA, 57 bp, Artificial Sequence
  3'-UTR of human proteasome subunit beta 3 (PSMB3)
ccctgttcccagagcccacttttttttctttttttgaaataaaatagcctgtctttc

SEQ ID NO: 1804 - RNA, 57 nt, Artificial Sequence
  3'-UTR of human proteasome subunit beta 3 (PSMB3) mRNA
cccuguucccagagcccacuuuuuuuucuuuuuuugaaauaaaauagccugucuuuc

SEQ ID NO: 1805 - DNA, 121 bp, Artificial Sequence
  3'-UTR of human caspase 1 (CASP1)
aataaggaaactgtatgaatgtctgtgggcaggaagtgaagagatccttctgtaaaggtttttggaattatgtctgctgaataataaacttttttgaaataataaatctggtagaaaaatg

SEQ ID NO: 1806 - RNA, 121 nt, Artificial Sequence
  3'-UTR of human caspase 1 (CASP1) mRNA
aauaaggaaacuguaugaaugucugugggcaggaagugaagagauccuucuguaaagguuuuuggaauuaugucugcugaauaauaaacuuuuuugaaauaauaaaucugguagaaaaaug

SEQ ID NO: 1807 - DNA, 137 bp, Artificial Sequence
  3'-UTR of human cytochrome c oxidase subunit 6B1 (COX6B1)
actggctgcatctccctttcctctgtcctccatccttctcccaggatggtgaagggggacctggtacccagtgatccccaccccaggatcctaaatcatgacttacctgctaataaaaactcattggaaaagtgaga

SEQ ID NO: 1808 - RNA, 137 nt, Artificial Sequence
  3'-UTR of human cytochrome c oxidase subunit 6B1 (COX6B1) mRNA
acuggcugcaucucccuuuccucuguccuccauccuucucccaggauggugaagggggaccugguacccagugauccccaccccaggauccuaaaucaugacuuaccugcuaauaaaaacucauuggaaaagugaga

SEQ ID NO: 1809 - DNA, 353 bp, Artificial Sequence
  3'-UTR of mouse GNAS (guanine nucleotide binding protein, alpha stimulating) complex locus (Gnas)
gaagggaacacccaaatttaattcagccttaagcacaattaattaagagtgaaacgtaattgtacaagcagttggtcacccaccatagggcatgatcaacaccgcaacctttcctttttcccccagtgattctgaaaaacccctcttcccttcagcttgcttagatgttccaaatttagtaagcttaaggcggcctacagaagaaaaagaaaaaaaaggccacaaaagttccctctcactttcagtaaataaaataaaagcagcaacagaaataaagaaataaatgaaattcaaaatgaaataaatattgtgttgtgcagcattaaaaaatcaataaaaattaaaaatgagca

SEQ ID NO: 1810 - RNA, 353 nt, Artificial Sequence
  3'-UTR of mouse GNAS (guanine nucleotide binding protein, alpha stimulating) complex locus (Gnas) mRNA
gaagggaacacccaaauuuaauucagccuuaagcacaauuaauuaagagugaaacguaauuguacaagcaguuggucacccaccauagggcaugaucaacaccgcaaccuuuccuuuuucccccagugauucugaaaaaccccucuucccuucagcuugcuuagauguuccaaauuuaguaagcuuaaggcggccuacagaagaaaaagaaaaaaaaggccacaaaaguucccucucacuuucaguaaauaaaauaaaagcagcaacagaaauaaagaaauaaaugaaauucaaaaugaaauaaauauuguguugugcagcauuaaaaaaucaauaaaaauuaaaaaugagca

SEQ ID NO: 1811 - DNA, 133 bp, Artificial Sequence
  3'-UTR of mouse NADH dehydrogenase (ubiquinone) 1 alpha subcomplex, 1 (Ndufa1)
ggaagcattttcctggctgattaaaagaaattactcagctatggtcatctgttcctgttagaaggctatgcagcatattatatactatgcgcatgttatgaaatgcataataaaaaattttaaaaaatctaaa

SEQ ID NO: 1812 - RNA, 133 nt, Artificial Sequence
  3'-UTR of mouse NADH dehydrogenase (ubiquinone) 1 alpha subcomplex, 1 (Ndufa1) mRNA
ggaagcauuuuccuggcugauuaaaagaaauuacucagcuauggucaucuguuccuguuagaaggcuaugcagcauauuauauacuaugcgcauguuaugaaaugcauaauaaaaaauuuuaaaaaaucuaaa

SEQ ID NO: 1813 - DNA, 70 bp, Artificial Sequence
  3'-UTR of human ribosomal protein S9 (RPS9)
gtccacctgtccctcctgggctgctggattgtctcgttttcctgccaaataaacaggatcagcgctttac

SEQ ID NO: 1814 - RNA, 70 nt, Artificial Sequence
  3'-UTR of human ribosomal protein S9 (RPS9) mRNA
guccaccugucccuccugggcugcuggauugucucguuuuccugccaaauaaacaggaucagcgcuuuac

SEQ ID NO: 1815 - DNA, 187 bp, Artificial Sequence
  3'-UTR ALB7
gcatcacatttaaaagcatctcagcctaccatgagaataagagaaagaaaatgaagatcaatagcttattcatctctttttctttttcgttggtgtaaagccaacaccctgtctaaaaaacataaatttctttaatcattttgcctcttttctctgtgcttcaattaataaaaaatggaaagaacct

SEQ ID NO: 1816 - RNA, 187 nt, Artificial Sequence
  3'-UTR ALB7 mRNA
gcaucacauuuaaaagcaucucagccuaccaugagaauaagagaaagaaaaugaagaucaauagcuuauucaucucuuuuucuuuuucguugguguaaagccaacacccugucuaaaaaacauaaauuucuuuaaucauuuugccucuuuucucugugcuucaauuaauaaaaaauggaaagaaccu

SEQ ID NO: 1817 - DNA, 44 bp, Artificial Sequence
  Center, alpha-complex-binding portion of the 3'-UTR of an alpha-globin gene (muag)
gcccgatgggcctcccaacgggccctcctcccctccttgcaccg

SEQ ID NO: 1818 - RNA, 44 nt, Artificial Sequence
  Center, alpha-complex-binding portion of the 3'-UTR of an alpha-globin gene (muag) mRNA
gcccgaugggccucccaacgggcccuccuccccuccuugcaccg

SEQ ID NO: 1819 - DNA, 24 bp, Artificial Sequence
  histone stem-loop sequence (histoneSL, hSL)
caaaggctcttttcagagccacca

SEQ ID NO: 1820 - RNA, 24 nt, Artificial Sequence
  histone stem-loop sequence (histoneSL, hSL) mRNA
caaaggcucuuuucagagccacca

SEQ ID NO: 1821 - DNA, 13 bp, Artificial Sequence
  Kozak
gccgccaccatgg

SEQ ID NO: 1822 - RNA, 13 nt, Artificial Sequence
  Kozak mRNA
gccgccaccaugg

SEQ ID NO: 1823 - RNA, 6 nt, Artificial Sequence
  mRNA 5'-end
gggaga

SEQ ID NO: 1824 - RNA, 6 nt, Artificial Sequence
  mRNA 5'-end
aggaga

SEQ ID NO: 1825 - RNA, 128 nt, Artificial Sequence
  mRNA 3'-end A64-N5-C30-histoneSL-N5
aaaaaaaaaaaaaaaaaaaaaaaaaaaaaaaaaaaaaaaaaaaaaaaaaaaaaaaaaaaaaaaaugcaucccccccccccccccccccccccccccccccaaaggcucuuuucagagccaccagaauu

SEQ ID NO: 1826 - RNA, 124 nt, Artificial Sequence
  mRNA 3'-end histoneSL-A100
caaaggcucuuuucagagccaccaaaaaaaaaaaaaaaaaaaaaaaaaaaaaaaaaaaaaaaaaaaaaaaaaaaaaaaaaaaaaaaaaaaaaaaaaaaaaaaaaaaaaaaaaaaaaaaaaaaaa

SEQ ID NO: 1827 - RNA, 100 nt, Artificial Sequence
  mRNA 3'-end A100
aaaaaaaaaaaaaaaaaaaaaaaaaaaaaaaaaaaaaaaaaaaaaaaaaaaaaaaaaaaaaaaaaaaaaaaaaaaaaaaaaaaaaaaaaaaaaaaaaaaa

SEQ ID NO: 1828 - RNA, 134 nt, Artificial Sequence
  mRNA 3'-end N6-A64-N5-C30-histoneSL-N5
auuaauaaaaaaaaaaaaaaaaaaaaaaaaaaaaaaaaaaaaaaaaaaaaaaaaaaaaaaaaaaaaaaaaugcaucccccccccccccccccccccccccccccccaaaggcucuuuucagagccaccagaauu

SEQ ID NO: 1829 - RNA, 134 nt, Artificial Sequence
  mRNA 3'-end N6-A64-N5-C30-histoneSL-N5
agaucuaaaaaaaaaaaaaaaaaaaaaaaaaaaaaaaaaaaaaaaaaaaaaaaaaaaaaaaaaaaaaaaaugcaucccccccccccccccccccccccccccccccaaaggcucuuuucagagccaccagaauu

SEQ ID NO: 1830 - RNA, 99 nt, Artificial Sequence
  mRNA 3'-end N6-histoneSL-A64-N5
auuaaucaaaggcucuuuucagagccaccaaaaaaaaaaaaaaaaaaaaaaaaaaaaaaaaaaaaaaaaaaaaaaaaaaaaaaaaaaaaaaaaagaauu

SEQ ID NO: 1831 - RNA, 99 nt, Artificial Sequence
  mRNA 3'-end N6-histoneSL-A64-N5
agaucucaaaggcucuuuucagagccaccaaaaaaaaaaaaaaaaaaaaaaaaaaaaaaaaaaaaaaaaaaaaaaaaaaaaaaaaaaaaaaaaagaauu

SEQ ID NO: 1832 - RNA, 110 nt, Artificial Sequence
  mRNA 3'-end N12-A64-N5-histoneSL-N5
auuaauagaucuaaaaaaaaaaaaaaaaaaaaaaaaaaaaaaaaaaaaaaaaaaaaaaaaaaaaaaaaaaaaaaaaugcaucaaaggcucuuuucagagccaccagaauu

SEQ ID NO: 1833 - RNA, 110 nt, Artificial Sequence; identical to SEQ ID NO: 1832
  mRNA 3'-end N12-A64-N5-histoneSL-N5

SEQ ID NO: 1834 - RNA, 130 nt, Artificial Sequence
  mRNA 3'-end N6-histoneSL-A100
auuaaucaaaggcucuuuucagagccaccaaaaaaaaaaaaaaaaaaaaaaaaaaaaaaaaaaaaaaaaaaaaaaaaaaaaaaaaaaaaaaaaaaaaaaaaaaaaaaaaaaaaaaaaaaaaaaaaaaaaa

SEQ ID NO: 1835 - RNA, 130 nt, Artificial Sequence
  mRNA 3'-end N6-histoneSL-A100
agaucucaaaggcucuuuucagagccaccaaaaaaaaaaaaaaaaaaaaaaaaaaaaaaaaaaaaaaaaaaaaaaaaaaaaaaaaaaaaaaaaaaaaaaaaaaaaaaaaaaaaaaaaaaaaaaaaaaaaa

SEQ ID NO: 1836 - RNA, 106 nt, Artificial Sequence
  mRNA 3'-end N6-A100
auuaauaaaaaaaaaaaaaaaaaaaaaaaaaaaaaaaaaaaaaaaaaaaaaaaaaaaaaaaaaaaaaaaaaaaaaaaaaaaaaaaaaaaaaaaaaaaaaaaaaaaa

SEQ ID NO: 1837 - RNA, 106 nt, Artificial Sequence
  mRNA 3'-end N6-A100
agaucuaaaaaaaaaaaaaaaaaaaaaaaaaaaaaaaaaaaaaaaaaaaaaaaaaaaaaaaaaaaaaaaaaaaaaaaaaaaaaaaaaaaaaaaaaaaaaaaaaaaa

SEQ ID NO: 1838 - RNA, 99 nt, Artificial Sequence
  mRNA 3'-end A75-histoneSL
aaaaaaaaaaaaaaaaaaaaaaaaaaaaaaaaaaaaaaaaaaaaaaaaaaaaaaaaaaaaaaaaaaaaaaaaaaacaaaggcucuuuucagagccacca

SEQ ID NO: 1839 - RNA, 102 nt, Artificial Sequence
  mRNA 3'-end U3-A75-histoneSL
uuuaaaaaaaaaaaaaaaaaaaaaaaaaaaaaaaaaaaaaaaaaaaaaaaaaaaaaaaaaaaaaaaaaaaaaaaaaaacaaaggcucuuuucagagccacca

SEQ ID NO: 1840 - RNA, 178 nt, Artificial Sequence
  mRNA 3'-end A154-histoneSL
aaaaaaaaaaaaaaaaaaaaaaaaaaaaaaaaaaaaaaaaaaaaaaaaaaaaaaaaaaaaaaaaaaaaaaaaaaaaaaaaaaaaaaaaaaaaaaaaaaaaaaaaaaaaaaaaaaaaaaaaaaaaaaaaaaaaaaaaaaaaaaaaaaaaaaaaaacaaaggcucuuuucagagccacca

SEQ ID NO: 1841 - RNA, 181 nt, Artificial Sequence
  mRNA 3'-end U3-A154-histoneSL
uuuaaaaaaaaaaaaaaaaaaaaaaaaaaaaaaaaaaaaaaaaaaaaaaaaaaaaaaaaaaaaaaaaaaaaaaaaaaaaaaaaaaaaaaaaaaaaaaaaaaaaaaaaaaaaaaaaaaaaaaaaaaaaaaaaaaaaaaaaaaaaaaaaaaaaaaaaaacaaaggcucuuuucagagccacca

SEQ ID NO: 1842 - RNA, 101 nt, Artificial Sequence
  mRNA 3'-end N2-A75-histoneSL
agaaaaaaaaaaaaaaaaaaaaaaaaaaaaaaaaaaaaaaaaaaaaaaaaaaaaaaaaaaaaaaaaaaaaaaaaaaacaaaggcucuuuucagagccacca

SEQ ID NO: 1843 - RNA, 99 nt, Artificial Sequence
  mRNA 3'-end histoneSL-A75
caaaggcucuuuucagagccaccaaaaaaaaaaaaaaaaaaaaaaaaaaaaaaaaaaaaaaaaaaaaaaaaaaaaaaaaaaaaaaaaaaaaaaaaaaaa

SEQ ID NO: 1844 - RNA, 170 nt, Artificial Sequence
  mRNA 3'-end histoneSL-A146
caaaggcucuuuucagagccaccaaaaaaaaaaaaaaaaaaaaaaaaaaaaaaaaaaaaaaaaaaaaaaaaaaaaaaaaaaaaaaaaaaaaaaaaaaaaaaaaaaaaaaaaaaaaaaaaaaaaaaaaaaaaaaaaaaaaaaaaaaaaaaaaaaaaaaaaaaaaaaaaaaa

SEQ ID NO: 1845 - RNA, 136 nt, Artificial Sequence
  mRNA 3'-end N8-A64-N5-C30-histoneSL-N5
agauuaauaaaaaaaaaaaaaaaaaaaaaaaaaaaaaaaaaaaaaaaaaaaaaaaaaaaaaaaaaaaaaaaaugcaucccccccccccccccccccccccccccccccaaaggcucuuuucagagccaccagaauu

SEQ ID NO: 1846 - RNA, 131 nt, Artificial Sequence
  mRNA 3'-end N8-A64-N5-C30-histoneSL
agauuaauaaaaaaaaaaaaaaaaaaaaaaaaaaaaaaaaaaaaaaaaaaaaaaaaaaaaaaaaaaaaaaaaugcaucccccccccccccccccccccccccccccccaaaggcucuuuucagagccacca

SEQ ID NO: 1847 - RNA, 105 nt, Artificial Sequence
  mRNA 3'-end N8-A64-N5-C4-histoneSL
agauuaauaaaaaaaaaaaaaaaaaaaaaaaaaaaaaaaaaaaaaaaaaaaaaaaaaaaaaaaaaaaaaaaaugcaucccccaaaggcucuuuucagagccacca

SEQ ID NO: 1848 - RNA, 115 nt, Artificial Sequence
  mRNA 3'-end N8-A64-N5-C14-histoneSL
agauuaauaaaaaaaaaaaaaaaaaaaaaaaaaaaaaaaaaaaaaaaaaaaaaaaaaaaaaaaaaaaaaaaaugcaucccccccccccccccaaaggcucuuuucagagccacca

SEQ ID NO: 1849 - RNA, 129 nt, Artificial Sequence
  mRNA 3'-end N6-A64-N5-C30-histoneSL
agaucuaaaaaaaaaaaaaaaaaaaaaaaaaaaaaaaaaaaaaaaaaaaaaaaaaaaaaaaaaaaaaaaaugcaucccccccccccccccccccccccccccccccaaaggcucuuuucagagccacca

SEQ ID NO: 1850 - RNA, 103 nt, Artificial Sequence
  mRNA 3'-end N6-A64-N5-C4-histoneSL
agaucuaaaaaaaaaaaaaaaaaaaaaaaaaaaaaaaaaaaaaaaaaaaaaaaaaaaaaaaaaaaaaaaaugcaucccccaaaggcucuuuucagagccacca

SEQ ID NO: 1851 - RNA, 113 nt, Artificial Sequence
  mRNA 3'-end N6-A64-N5-C14-histoneSL
agaucuaaaaaaaaaaaaaaaaaaaaaaaaaaaaaaaaaaaaaaaaaaaaaaaaaaaaaaaaaaaaaaaaugcaucccccccccccccccaaaggcucuuuucagagccacca

SEQ ID NO: 1852 - RNA, 99 nt, Artificial Sequence
  mRNA 3'-end N6-A64-histoneSL-N5
agaucuaaaaaaaaaaaaaaaaaaaaaaaaaaaaaaaaaaaaaaaaaaaaaaaaaaaaaaaaaaaaaaaacaaaggcucuuuucagagccaccagaauu

SEQ ID NO: 1853 - RNA, 123 nt, Artificial Sequence
  mRNA 3'-end A64-N5-C30-histoneSL
aaaaaaaaaaaaaaaaaaaaaaaaaaaaaaaaaaaaaaaaaaaaaaaaaaaaaaaaaaaaaaaaugcaucccccccccccccccccccccccccccccccaaaggcucuuuucagagccacca

SEQ ID NO: 1854 - RNA, 97 nt, Artificial Sequence
  mRNA 3'-end A64-N5-C4-histoneSL
aaaaaaaaaaaaaaaaaaaaaaaaaaaaaaaaaaaaaaaaaaaaaaaaaaaaaaaaaaaaaaaaugcaucccccaaaggcucuuuucagagccacca

SEQ ID NO: 1855 - RNA, 107 nt, Artificial Sequence
  mRNA 3'-end A64-N5-C14-histoneSL
aaaaaaaaaaaaaaaaaaaaaaaaaaaaaaaaaaaaaaaaaaaaaaaaaaaaaaaaaaaaaaaaugcaucccccccccccccccaaaggcucuuuucagagccacca

SEQ ID NO: 1856 - RNA, 93 nt, Artificial Sequence
  mRNA 3'-end A64-histoneSL-N5
aaaaaaaaaaaaaaaaaaaaaaaaaaaaaaaaaaaaaaaaaaaaaaaaaaaaaaaaaaaaaaaacaaaggcucuuuucagagccaccagaauu

SEQ ID NO: 1857 - protein, 14 aa, Artificial Sequence
  derived and/or modified protein sequence (artificial) from Artificial____carrier peptide 1
CRRRRRRRRRRRRC

SEQ ID NO: 1858 - protein, 13 aa, Artificial Sequence
  derived and/or modified protein sequence (artificial) from Artificial____carrier peptide 2
CRRRRRRRRRRRR

SEQ ID NO: 1859 - protein, 14 aa, Artificial Sequence
  derived and/or modified protein sequence (artificial) from Artificial____carrier peptide 3
WRRRRRRRRRRRRC

SEQ ID NO: 1860 - protein, 18 aa, Artificial Sequence
  derived and/or modified protein sequence (artificial) from Artificial____carrier peptide 4
CHHHHHHRRRRHHHHHHC

SEQ ID NO: 1861 - protein, 18 aa, Artificial Sequence
  derived and/or modified protein sequence (artificial) from Artificial____carrier peptide 5
CGHHHHHRRRRHHHHHGC

SEQ ID NO: 1862 - RNA, 791 nt, Artificial Sequence; identical to SEQ ID NO: 591
  mRNA product Design a-1 (A100) comprising derived and/or modified sequence from RVA/BE1128/P[8]__AEX30671.1__P2_VP8*(65-223) (opt1) R8131/R8580/R8581

SEQ ID NO: 1863 - RNA, 815 nt, Artificial Sequence; identical to SEQ ID NO: 1167
  mRNA product Design a-1 (hSL-A100) comprising derived and/or modified sequence from RVA/BE1128/P[8]__AEX30671.1__P2_VP8*(65-223) (opt1) R8575/R8576/R8628

SEQ ID NO: 1864 - RNA, 819 nt, Artificial Sequence
  mRNA product Design a-1 (A64-N5-C30-hSL-N5) comprising derived and/or modified sequence from RVA/BE1128/P[8]__AEX30671.1__P2_VP8*(65-223) (opt1) R8044/R8134
aggagagucccgcagucggcguccagcggcucugcuuguucgugugugugucguugcaggccuuauucaagcuuaccaugcaguacaucaaggccaacagcaaguucaucggcaucaccgagcugggcagcggguccggccucgacggcccguaccagccgacgaccuucaccccgcccaccgacuacuggauccugaucacguccaacaccaacggggugguguacgagagcaccaacaacuccgacuucuggaccgccgucaucgccguggagccccacgugaacccggucgaccgccaguacaacguguucggcgagaacaagcaguucaacgugcggaacgacagcgacaaguggaaguuccuggagauguuccgcggcuccagccagaacgacuucuacaaccggcgcacgcucaccuccgacacccggcuggucgggauccugaaguacggcgggcgcguguggaccuuccacggcgagacgccccgggccaccaccgacagcuccaacaccgccaaccucgacgggaucagcaucacgauccacuccgaguucuacaucaucccccgcagccaggaguccaagugcaacgaguacaucaacaacggccugugaggacuagucccuguucccagagcccacuuuuuuuucuuuuuuugaaauaaaauagccugucuuucagaucuaaaaaaaaaaaaaaaaaaaaaaaaaaaaaaaaaaaaaaaaaaaaaaaaaaaaaaaaaaaaaaaaugcaucccccccccccccccccccccccccccccccaaaggcucuuuucagagccaccagaauu

SEQ ID NO: 1865 - RNA, 925 nt, Artificial Sequence
  mRNA product Design i-2 (A64-N5-C30-hSL-N5) comprising derived and/or modified sequence from RVA/BE1128/P[8]__AEX30671.1__P2_VP8*(65-223) (opt1) R5470/R5471/R7877/R7967/R8045/R8046/R8135
ggggcgcugccuacggagguggcagccaucuccuucucggcaucaagcuuaccaugcaguacaucaaggccaacagcaaguucaucggcaucaccgagcugggcagcggguccggccucgacggcccguaccagccgacgaccuucaccccgcccaccgacuacuggauccugaucacguccaacaccaacggggugguguacgagagcaccaacaacuccgacuucuggaccgccgucaucgccguggagccccacgugaacccggucgaccgccaguacaacguguucggcgagaacaagcaguucaacgugcggaacgacagcgacaaguggaaguuccuggagauguuccgcggcuccagccagaacgacuucuacaaccggcgcacgcucaccuccgacacccggcuggucgggauccugaaguacggcgggcgcguguggaccuuccacggcgagacgccccgggccaccaccgacagcuccaacaccgccaaccucgacgggaucagcaucacgauccacuccgaguucuacaucaucccccgcagccaggaguccaagugcaacgaguacaucaacaacggccugugaggacuagugcaucacauuuaaaagcaucucagccuaccaugagaauaagagaaagaaaaugaagaucaauagcuuauucaucucuuuuucuuuuucguugguguaaagccaacacccugucuaaaaaacauaaauuucuuuaaucauuuugccucuuuucucugugcuucaauuaauaaaaaauggaaagaaccuagaucuaaaaaaaaaaaaaaaaaaaaaaaaaaaaaaaaaaaaaaaaaaaaaaaaaaaaaaaaaaaaaaaaugcaucccccccccccccccccccccccccccccccaaaggcucuuuucagagccaccagaauu

SEQ ID NO: 1866 - RNA, 791 nt, Artificial Sequence
  mRNA product Design a-1 (A100) comprising derived and/or modified sequence from RVA/BE1128/P[8]__AEX30671.1__P2_VP8*(65-223) (opt3) R8133
aggagagucccgcagucggcguccagcggcucugcuuguucgugugugugucguugcaggccuuauucaagcuuaccaugcaguacaucaaggccaacagcaaauucauuggcauaaccgagcugggguccggaucuggucucgacggccccuaucaaccuacaacuuuuacgccaccgaccgauuacuggauccuuauuacaucaaauacuaacgggguggucuaugaaaguaccaauaacagcgacuucuggacagcuguuaucgcaguggagccccacguaaauccuguggauagacaguacaacgucuuuggagaaaauaagcaguucaacgugaggaaugacuccgauaaauggaaguuucuggagauguuccggggcucaucgcagaacgacuuuuauaaucgccgaaccuugacuucagauacacguuuaguugguauucugaaauacgggggaagaguguggaccuuccauggcgaaacgccaagggccacuaccgacagcaguaacacagcgaaucuagauggcaucuccauaacuauccacucugaguuuuauauuaucccccggagccaagaguccaagugcaacgaauacauuaauaacgggcucugaggacuagucccuguucccagagcccacuuuuuuuucuuuuuuugaaauaaaauagccugucuuucagaucuaaaaaaaaaaaaaaaaaaaaaaaaaaaaaaaaaaaaaaaaaaaaaaaaaaaaaaaaaaaaaaaaaaaaaaaaaaaaaaaaaaaaaaaaaaaaaaaaaaaa

SEQ ID NO: 1867 - RNA, 815 nt, Artificial Sequence
  mRNA product Design a-1 (hSL-A100) comprising derived and/or modified sequence from RVA/BE1128/P[8]__AEX30671.1__P2_VP8*(65-223) (opt3) R8629
aggagagucccgcagucggcguccagcggcucugcuuguucgugugugugucguugcaggccuuauucaagcuuaccaugcaguacaucaaggccaacagcaaauucauuggcauaaccgagcugggguccggaucuggucucgacggccccuaucaaccuacaacuuuuacgccaccgaccgauuacuggauccuuauuacaucaaauacuaacgggguggucuaugaaaguaccaauaacagcgacuucuggacagcuguuaucgcaguggagccccacguaaauccuguggauagacaguacaacgucuuuggagaaaauaagcaguucaacgugaggaaugacuccgauaaauggaaguuucuggagauguuccggggcucaucgcagaacgacuuuuauaaucgccgaaccuugacuucagauacacguuuaguugguauucugaaauacgggggaagaguguggaccuuccauggcgaaacgccaagggccacuaccgacagcaguaacacagcgaaucuagauggcaucuccauaacuauccacucugaguuuuauauuaucccccggagccaagaguccaagugcaacgaauacauuaauaacgggcucugaggacuagucccuguucccagagcccacuuuuuuuucuuuuuuugaaauaaaauagccugucuuucagaucucaaaggcucuuuucagagccaccaaaaaaaaaaaaaaaaaaaaaaaaaaaaaaaaaaaaaaaaaaaaaaaaaaaaaaaaaaaaaaaaaaaaaaaaaaaaaaaaaaaaaaaaaaaaaaaaaaaaa

SEQ ID NO: 1868 - RNA, 819 nt, Artificial Sequence
  mRNA product Design a-1 (A64-N5-C30-hSL-N5) comprising derived and/or modified sequence from RVA/BE1128/P[8]__AEX30671.1__P2_VP8*(65-223) (opt3) R8049/R8136
aggagagucccgcagucggcguccagcggcucugcuuguucgugugugugucguugcaggccuuauucaagcuuaccaugcaguacaucaaggccaacagcaaauucauuggcauaaccgagcugggguccggaucuggucucgacggccccuaucaaccuacaacuuuuacgccaccgaccgauuacuggauccuuauuacaucaaauacuaacgggguggucuaugaaaguaccaauaacagcgacuucuggacagcuguuaucgcaguggagccccacguaaauccuguggauagacaguacaacgucuuuggagaaaauaagcaguucaacgugaggaaugacuccgauaaauggaaguuucuggagauguuccggggcucuucgcagaacgacuuuuauaaucgccgaaccuugacuucagauacacguuuaguugguauucugaaauacgggggaagaguguggaccuuccauggcgaaacgccaagggccacuaccgacagcaguaacacagcgaaucuagauggcaucuccauaacuauccacucugaguuuuauauuaucccccggagccaagaguccaagugcaacgaauacauuaauaacgggcucugaggacuagucccuguucccagagcccacuuuuuuuucuuuuuuugaaauaaaauagccugucuuucagaucuaaaaaaaaaaaaaaaaaaaaaaaaaaaaaaaaaaaaaaaaaaaaaaaaaaaaaaaaaaaaaaaaugcaucccccccccccccccccccccccccccccccaaaggcucuuuucagagccaccagaauu

SEQ ID NO: 1869 - RNA, 760 nt, Artificial Sequence
  mRNA product Design i-3 (A64-N5-C30-hSL-N5) comprising derived and/or modified sequence from RVA/BE1128/P[8]__AEX30671.1__P2_VP8*(65-223) (opt3) R7043/R7411/R8137
gggagaaagcuuaccaugcaguacaucaaggccaacagcaaauucauuggcauaaccgagcugggguccggaucuggucucgacggccccuaucaaccuacaacuuuuacgccaccgaccgauuacuggauccuuauuacaucaaauacuaacgggguggucuaugaaaguaccaauaacagcgacuucuggacagcuguuaucgcaguggagccccacguaaauccuguggauagacaguacaacgucuuuggagaaaauaagcaguucaacgugaggaaugacuccgauaaauggaaguuucuggagauguuccggggcucuucgcagaacgacuuuuauaaucgccgaaccuugacuucagauacacguuuaguugguauucugaaauacgggggaagaguguggaccuuccauggcgaaacgccaagggccacuaccgacagcaguaacacagcgaaucuagauggcaucuccauaacuauccacucugaguuuuauauuaucccccggagccaagaguccaagugcaacgaauacauuaauaacgggcucugaggacuaguuauaagacugacuagcccgaugggccucccaacgggcccuccuccccuccuugcaccgagauuaauaaaaaaaaaaaaaaaaaaaaaaaaaaaaaaaaaaaaaaaaaaaaaaaaaaaaaaaaaaaaaaaaugcaucccccccccccccccccccccccccccccccaaaggcucuuuucagagccaccagaauu

SEQ ID NO: 1870 - RNA, 925 nt, Artificial Sequence
  mRNA product Design i-2 (A64-N5-C30-hSL-N5) comprising derived and/or modified sequence from RVA/BE1128/P[8]__AEX30671.1__P2_VP8*(65-223) (opt3) R8047
ggggcgcugccuacggagguggcagccaucuccuucucggcaucaagcuuaccaugcaguacaucaaggccaacagcaaauucauuggcauaaccgagcugggguccggaucuggucucgacggccccuaucaaccuacaacuuuuacgccaccgaccgauuacuggauccuuauuacaucaaauacuaacgggguggucuaugaaaguaccaauaacagcgacuucuggacagcuguuaucgcaguggagccccacguaaauccuguggauagacaguacaacgucuuuggagaaaauaagcaguucaacgugaggaaugacuccgauaaauggaaguuucuggagauguuccggggcucuucgcagaacgacuuuuauaaucgccgaaccuugacuucagauacacguuuaguugguauucugaaauacgggggaagaguguggaccuuccauggcgaaacgccaagggccacuaccgacagcaguaacacagcgaaucuagauggcaucuccauaacuauccacucugaguuuuauauuaucccccggagccaagaguccaagugcaacgaauacauuaauaacgggcucugaggacuagugcaucacauuuaaaagcaucucagccuaccaugagaauaagagaaagaaaaugaagaucaauagcuuauucaucucuuuuucuuuuucguugguguaaagccaacacccugucuaaaaaacauaaauuucuuuaaucauuuugccucuuuucucugugcuucaauuaauaaaaaauggaaagaaccuagaucuaaaaaaaaaaaaaaaaaaaaaaaaaaaaaaaaaaaaaaaaaaaaaaaaaaaaaaaaaaaaaaaaugcaucccccccccccccccccccccccccccccccaaaggcucuuuucagagccaccagaauu

SEQ ID NO: 1871 - RNA, 997 nt, Artificial Sequence
  mRNA product Design i-2 (A64-N5-C30-hSL-N5) comprising derived and/or modified sequence from RVA/BE1128/P[8]__AEX30671.1__P2_VP8*(41-223) (opt1) R5472/R5473
ggggcgcugccuacggagguggcagccaucuccuucucggcaucaagcuuaccaugcaguacaucaaggccaacagcaaguucaucggcaucaccgagcugggcagcggguccggcgcccagacccgguacgcgcccgugaacuggggccacggggagaucaacgacagcaccaccgucgagcccauccucgacggcccguaccagccgacgaccuucaccccgcccaccgacuacuggauccugaucacguccaacaccaacggggugguguacgagagcaccaacaacuccgacuucuggaccgccgucaucgccguggagccccacgugaacccggucgaccgccaguacaacguguucggcgagaacaagcaguucaacgugcggaacgacagcgacaaguggaaguuccuggagauguuccgcggcuccagccagaacgacuucuacaaccggcgcacgcucaccuccgacacccggcuggucgggauccugaaguacggcgggcgcguguggaccuuccacggcgagacgccccgggccaccaccgacagcuccaacaccgccaaccucgacgggaucagcaucacgauccacuccgaguucuacaucaucccccgcagccaggaguccaagugcaacgaguacaucaacaacggccugugaggacuagugcaucacauuuaaaagcaucucagccuaccaugagaauaagagaaagaaaaugaagaucaauagcuuauucaucucuuuuucuuuuucguugguguaaagccaacacccugucuaaaaaacauaaauuucuuuaaucauuuugccucuuuucucugugcuucaauuaauaaaaaauggaaagaaccuagaucuaaaaaaaaaaaaaaaaaaaaaaaaaaaaaaaaaaaaaaaaaaaaaaaaaaaaaaaaaaaaaaaaugcaucccccccccccccccccccccccccccccccaaaggcucuuuucagagccaccagaauu

SEQ ID NO: 1872 - RNA, 1289 nt, Artificial Sequence; identical to SEQ ID NO: 609
  mRNA product Design a-1 (A100) comprising derived and/or modified sequence from RVA/BE1128/P[8]__AEX30671.1__P2_VP8*(65-223)_Ferritin (opt1) R8582

SEQ ID NO: 1873 - RNA, 1313 nt, Artificial Sequence; identical to SEQ ID NO: 1185
  mRNA product Design a-1 (hSL-A100) comprising derived and/or modified sequence from RVA/BE1128/P[8]__AEX30671.1__P2_VP8*(65-223)_Ferritin (opt1) R8577

SEQ ID NO: 1874 - RNA, 1423 nt, Artificial Sequence
  mRNA product Design i-2 (A64-N5-C30-hSL-N5) comprising derived and/or modified sequence from RVA/BE1128/P[8]__AEX30671.1__P2_VP8*(65-223)_Ferritin (opt1) R6326/R6327
ggggcgcugccuacggagguggcagccaucuccuucucggcaucaagcuuaccaugcaguacaucaaggccaacagcaaguucaucggcaucaccgagcugggcagcggguccggccucgacggcccguaccagccgacgaccuucaccccgcccaccgacuacuggauccugaucacguccaacaccaacggggugguguacgagagcaccaacaacuccgacuucuggaccgccgucaucgccguggagccccacgugaacccggucgaccgccaguacaacguguucggcgagaacaagcaguucaacgugcggaacgacagcgacaaguggaaguuccuggagauguuccgcggcuccagccagaacgacuucuacaaccggcgcacgcucaccuccgacacccggcuggucgggauccugaaguacggcgggcgcguguggaccuuccacggcgagacgccccgggccaccaccgacagcuccaacaccgccaaccucgacgggaucagcaucacgauccacuccgaguucuacaucaucccccgcagccaggaguccaagugcaacgaguacaucaacaacggccugagcggcggggacaucaucaagcuccugaacgagcaggugaacaaggagaugcaguccagcaaccuguacauguccaugagcuccuggugcuacacccacagccucgacggcgccgggcuguuccuguucgaccacgccgcggaggaguacgagcacgccaagaagcucaucaucuuccugaacgagaacaacguccccgugcagcugaccuccaucagcgccccggagcacaaguucgagggccucacgcagaucuuccagaaggccuacgagcacgagcagcacaucuccgagagcaucaacaacaucguggaccacgccaucaaguccaaggaccacgcgaccuucaacuuccugcagugguacgucgccgagcagcacgaggaggaggugcuguucaaggacauccucgacaagaucgagcugaucgggaacgagaaccacggccuguaccucgccgaccaguacgugaaggggaucgccaagagccgcaaguccugaggacuagugcaucacauuuaaaagcaucucagccuaccaugagaauaagagaaagaaaaugaagaucaauagcuuauucaucucuuuuucuuuuucguugguguaaagccaacacccugucuaaaaaacauaaauuucuuuaaucauuuugccucuuuucucugugcuucaauuaauaaaaaauggaaagaaccuagaucuaaaaaaaaaaaaaaaaaaaaaaaaaaaaaaaaaaaaaaaaaaaaaaaaaaaaaaaaaaaaaaaaugcaucccccccccccccccccccccccccccccccaaaggcucuuuucagagccaccagaauu

SEQ ID NO: 1875 - RNA, 1367 nt, Artificial Sequence; identical to SEQ ID NO: 636
  mRNA product Design a-1 (A100) comprising derived and/or modified sequence from RVA/BE1128/P[8]__AEX30671.1__LumSynt_P2_VP8*(41-223) (opt1) R8583

SEQ ID NO: 1876 - RNA, 1391 nt, Artificial Sequence; identical to SEQ ID NO: 1212
  mRNA product Design a-1 (hSL-A100) comprising derived and/or modified sequence from RVA/BE1128/P[8]__AEX30671.1__LumSynt_P2_VP8*(41-223) (opt1) R8578

SEQ ID NO: 1877 - RNA, 1501 nt, Artificial Sequence
  mRNA product Design i-2 (A64-N5-C30-hSL-N5) comprising derived and/or modified sequence from RVA/BE1128/P[8]__AEX30671.1__LumSynt_P2_VP8*(41-223) (opt1) R6328/R6329
ggggcgcugccuacggagguggcagccaucuccuucucggcaucaagcuuaccaugcagaucuacgagggcaagcugaccgccgaggggcuccgcuucggcaucguggccagccgguucaaccacgcgcuggucgaccgccugguggagggggccaucgacgccaucgugcggcacggcgggcgcgaggaggacaucacccucguccgggugcccggcuccugggagaucccgguggccgccggcgagcuggcccgcaaggaggacaucgacgcggucaucgccaucggggugcugauccggggcgccacgccccacuucgacuacaucgccagcgagguguccaaggggcucgcggaccugagccuggagcuccgcaagcccaucaccuucggcgucaucaccgccgacacccuggagcaggccaucgagcgggccgggacgaagcacggcaacaagggcugggaggccgcgcuguccgccaucgagauggccaaccucuucaagagccugcgcggcgggagcggcggguccggcgggagcggcggcuccgggggcgggcaguacaucaaggccaacagcaaguucaucggcaucaccgagcugggcagcggguccggcgcccagacccgguacgcgcccgugaacuggggccacggggagaucaacgacagcaccaccgucgagcccauccucgacggcccguaccagccgacgaccuucaccccgcccaccgacuacuggauccugaucacguccaacaccaacggggugguguacgagagcaccaacaacuccgacuucuggaccgccgucaucgccguggagccccacgugaacccggucgaccgccaguacaacguguucggcgagaacaagcaguucaacgugcggaacgacagcgacaaguggaaguuccuggagauguuccgcggcuccagccagaacgacuucuacaaccggcgcacgcucaccuccgacacccggcuggucgggauccugaaguacggcgggcgcguguggaccuuccacggcgagacgccccgggccaccaccgacagcuccaacaccgccaaccucgacgggaucagcaucacgauccacuccgaguucuacaucaucccccgcagccaggaguccaagugcaacgaguacaucaacaacggccugugaggacuagugcaucacauuuaaaagcaucucagccuaccaugagaauaagagaaagaaaaugaagaucaauagcuuauucaucucuuuuucuuuuucguugguguaaagccaacacccugucuaaaaaacauaaauuucuuuaaucauuuugccucuuuucucugugcuucaauuaauaaaaaauggaaagaaccuagaucuaaaaaaaaaaaaaaaaaaaaaaaaaaaaaaaaaaaaaaaaaaaaaaaaaaaaaaaaaaaaaaaaugcaucccccccccccccccccccccccccccccccaaaggcucuuuucagagccaccagaauu

SEQ ID NO: 1878 - RNA, 914 nt, Artificial Sequence; identical to SEQ ID NO: 654
  mRNA product Design a-1 (A100) comprising derived and/or modified sequence from RVA/BE1128/P[8]__AEX30671.1__SP-IgE_P2_VP8*(41-223) (opt1) R8584

SEQ ID NO: 1879 - RNA, 938 nt, Artificial Sequence; identical to SEQ ID NO: 1230
  mRNA product Design a-1 (hSL-A100) comprising derived and/or modified sequence from RVA/BE1128/P[8]__AEX30671.1__SP-IgE_P2_VP8*(41-223) (opt1) R8579

SEQ ID NO: 1880 - RNA, 1048 nt, Artificial Sequence
  mRNA product Design i-2 (A64-N5-C30-hSL-N5) comprising derived and/or modified sequence from RVA/BE1128/P[8]__AEX30671.1__SP-IgE_P2_VP8*(41-223) (opt1) R5488/R5489
ggggcgcugccuacggagguggcagccaucuccuucucggcaucaagcuuaccauggacuggaccuggauccuguuccucguggccgccgcgacccgcguccacagccaguacaucaaggccaacagcaaguucaucggcaucaccgagcugggcagcggguccggcgcccagacccgguacgcgcccgugaacuggggccacggggagaucaacgacagcaccaccgucgagcccauccucgacggcccguaccagccgacgaccuucaccccgcccaccgacuacuggauccugaucacguccaacaccaacggggugguguacgagagcaccaacaacuccgacuucuggaccgccgucaucgccguggagccccacgugaacccggucgaccgccaguacaacguguucggcgagaacaagcaguucaacgugcggaacgacagcgacaaguggaaguuccuggagauguuccgcggcuccagccagaacgacuucuacaaccggcgcacgcucaccuccgacacccggcuggucgggauccugaaguacggcgggcgcguguggaccuuccacggcgagacgccccgggccaccaccgacagcuccaacaccgccaaccucgacgggaucagcaucacgauccacuccgaguucuacaucaucccccgcagccaggaguccaagugcaacgaguacaucaacaacggccugugaggacuagugcaucacauuuaaaagcaucucagccuaccaugagaauaagagaaagaaaaugaagaucaauagcuuauucaucucuuuuucuuuuucguugguguaaagccaacacccugucuaaaaaacauaaauuucuuuaaucauuuugccucuuuucucugugcuucaauuaauaaaaaauggaaagaaccuagaucuaaaaaaaaaaaaaaaaaaaaaaaaaaaaaaaaaaaaaaaaaaaaaaaaaaaaaaaaaaaaaaaaugcaucccccccccccccccccccccccccccccccaaaggcucuuuucagagccaccagaauu

SEQ ID NO: 1881 - RNA, 1546 nt, Artificial Sequence
  mRNA product Design i-2 (A64-N5-C30-hSL-N5) comprising derived and/or modified sequence from RVA/BE1128/P[8]__AEX30671.1__SP-IgE_P2_VP8*(41-223)_Ferritin (opt1) R6322/R6323
ggggcgcugccuacggagguggcagccaucuccuucucggcaucaagcuuaccauggacuggaccuggauccuguuccucguggccgccgcgacccgcguccacagccaguacaucaaggccaacagcaaguucaucggcaucaccgagcugggcagcggguccggcgcccagacccgguacgcgcccgugaacuggggccacggggagaucaacgacagcaccaccgucgagcccauccucgacggcccguaccagccgacgaccuucaccccgcccaccgacuacuggauccugaucacguccaacaccaacggggugguguacgagagcaccaacaacuccgacuucuggaccgccgucaucgccguggagccccacgugaacccggucgaccgccaguacaacguguucggcgagaacaagcaguucaacgugcggaacgacagcgacaaguggaaguuccuggagauguuccgcggcuccagccagaacgacuucuacaaccggcgcacgcucaccuccgacacccggcuggucgggauccugaaguacggcgggcgcguguggaccuuccacggcgagacgccccgggccaccaccgacagcuccaacaccgccaaccucgacgggaucagcaucacgauccacuccgaguucuacaucaucccccgcagccaggaguccaagugcaacgaguacaucaacaacggccugagcggcggggacaucaucaagcuccugaacgagcaggugaacaaggagaugcaguccagcaaccuguacauguccaugagcuccuggugcuacacccacagccucgacggcgccgggcuguuccuguucgaccacgccgcggaggaguacgagcacgccaagaagcucaucaucuuccugaacgagaacaacguccccgugcagcugaccuccaucagcgccccggagcacaaguucgagggccucacgcagaucuuccagaaggccuacgagcacgagcagcacaucuccgagagcaucaacaacaucguggaccacgccaucaaguccaaggaccacgcgaccuucaacuuccugcagugguacgucgccgagcagcacgaggaggaggugcuguucaaggacauccucgacaagaucgagcugaucgggaacgagaaccacggccuguaccucgccgaccaguacgugaaggggaucgccaagagccgcaaguccugaggacuagugcaucacauuuaaaagcaucucagccuaccaugagaauaagagaaagaaaaugaagaucaauagcuuauucaucucuuuuucuuuuucguugguguaaagccaacacccugucuaaaaaacauaaauuucuuuaaucauuuugccucuuuucucugugcuucaauuaauaaaaaauggaaagaaccuagaucuaaaaaaaaaaaaaaaaaaaaaaaaaaaaaaaaaaaaaaaaaaaaaaaaaaaaaaaaaaaaaaaaugcaucccccccccccccccccccccccccccccccaaaggcucuuuucagagccaccagaauu

SEQ ID NO: 1882 - RNA, 1201 nt, Artificial Sequence
  mRNA product Design i-2 (A64-N5-C30-hSL-N5) comprising derived and/or modified sequence from RVA/BE1128/P[8]__AEX30671.1__SP-IgE_P2_VP8*(41-223)_TM domain-HA (opt1) R6324/R6325
ggggcgcugccuacggagguggcagccaucuccuucucggcaucaagcuuaccauggacuggaccuggauccuguuccucguggccgccgcgacccgcguccacagccaguacaucaaggccaacagcaaguucaucggcaucaccgagcugggcagcggguccggcgcccagacccgguacgcgcccgugaacuggggccacggggagaucaacgacagcaccaccgucgagcccauccucgacggcccguaccagccgacgaccuucaccccgcccaccgacuacuggauccugaucacguccaacaccaacggggugguguacgagagcaccaacaacuccgacuucuggaccgccgucaucgccguggagccccacgugaacccggucgaccgccaguacaacguguucggcgagaacaagcaguucaacgugcggaacgacagcgacaaguggaaguuccuggagauguuccgcggcuccagccagaacgacuucuacaaccggcgcacgcucaccuccgacacccggcuggucgggauccugaaguacggcgggcgcguguggaccuuccacggcgagacgccccgggccaccaccgacagcuccaacaccgccaaccucgacgggaucagcaucacgauccacuccgaguucuacaucaucccccgcagccaggaguccaagugcaacgaguacaucaacaacggccugggcagcggguccggcaagcucgaguccacgcggaucuaccagauccuggcgaucuacagcaccgucgccagcucccuggugcucguggucagccugggggccaucuccuucuggaugugcagcaacggcucccugcagugccgcaucugcaucugaggacuagugcaucacauuuaaaagcaucucagccuaccaugagaauaagagaaagaaaaugaagaucaauagcuuauucaucucuuuuucuuuuucguugguguaaagccaacacccugucuaaaaaacauaaauuucuuuaaucauuuugccucuuuucucugugcuucaauuaauaaaaaauggaaagaaccuagaucuaaaaaaaaaaaaaaaaaaaaaaaaaaaaaaaaaaaaaaaaaaaaaaaaaaaaaaaaaaaaaaaaugcaucccccccccccccccccccccccccccccccaaaggcucuuuucagagccaccagaauu

SEQ ID NO: 1883 - RNA, 1870 nt, Artificial Sequence
  mRNA product Design i-3 (A64-N5-C30-hSL-N5) comprising derived and/or modified sequence from Photinus pyralis__AAA88784__luciferase_PpLuc (opt1) R2569
gggagaaagcuugaggauggaggacgccaagaacaucaagaagggcccggcgcccuucuacccgcuggaggacgggaccgccggcgagcagcuccacaaggccaugaagcgguacgcccuggugccgggcacgaucgccuucaccgacgcccacaucgaggucgacaucaccuacgcggaguacuucgagaugagcgugcgccuggccgaggccaugaagcgguacggccugaacaccaaccaccggaucguggugugcucggagaacagccugcaguucuucaugccggugcugggcgcccucuucaucggcguggccgucgccccggcgaacgacaucuacaacgagcgggagcugcugaacagcauggggaucagccagccgaccgugguguucgugagcaagaagggccugcagaagauccugaacgugcagaagaagcugcccaucauccagaagaucaucaucauggacagcaagaccgacuaccagggcuuccagucgauguacacguucgugaccagccaccucccgccgggcuucaacgaguacgacuucgucccggagagcuucgaccgggacaagaccaucgcccugaucaugaacagcagcggcagcaccggccugccgaaggggguggcccugccgcaccggaccgccugcgugcgcuucucgcacgcccgggaccccaucuucggcaaccagaucaucccggacaccgccauccugagcguggugccguuccaccacggcuucggcauguucacgacccugggcuaccucaucugcggcuuccgggugguccugauguaccgguucgaggaggagcuguuccugcggagccugcaggacuacaagauccagagcgcgcugcucgugccgacccuguucagcuucuucgccaagagcacccugaucgacaaguacgaccugucgaaccugcacgagaucgccagcgggggcgccccgcugagcaaggaggugggcgaggccguggccaagcgguuccaccucccgggcauccgccagggcuacggccugaccgagaccacgagcgcgauccugaucacccccgagggggacgacaagccgggcgccgugggcaagguggucccguucuucgaggccaaggugguggaccuggacaccggcaagacccugggcgugaaccagcggggcgagcugugcgugcgggggccgaugaucaugagcggcuacgugaacaacccggaggccaccaacgcccucaucgacaaggacggcuggcugcacagcggcgacaucgccuacugggacgaggacgagcacuucuucaucgucgaccggcugaagucgcugaucaaguacaagggcuaccagguggcgccggccgagcuggagagcauccugcuccagcaccccaacaucuucgacgccggcguggccgggcugccggacgacgacgccggcgagcugccggccgcggugguggugcuggagcacggcaagaccaugacggagaaggagaucgucgacuacguggccagccaggugaccaccgccaagaagcugcggggcggcgugguguucguggacgaggucccgaagggccugaccgggaagcucgacgcccggaagauccgcgagauccugaucaaggccaagaagggcggcaagaucgccguguaagacuaguuauaagacugacuagcccgaugggccucccaacgggcccuccuccccuccuugcaccgagauuaauaaaaaaaaaaaaaaaaaaaaaaaaaaaaaaaaaaaaaaaaaaaaaaaaaaaaaaaaaaaaaaaaugcaucccccccccccccccccccccccccccccccaaaggcucuuuucagagccaccagaauu

SEQ ID NO: 1884 - RNA, 2005 nt, Artificial Sequence
  mRNA product Design i-2 (A64-N5-C30-hSL-N5) comprising derived and/or modified sequence from NOV/Hu/GII.4/031693/USA/2003__AFN70960__capsid_protein (opt1) R4865
ggggcgcugccuacggagguggcagccaucuccuucucggcaucaagcuuaccaugaagauggccagcaaggacgccaaccccuccgacggcagcaccgcgaaccuggugccggaggucaacaacgaggugauggcccucgagcccguggucggggccgccaucgccgcgcccguggccggccagcagaacgugaucgaccccuggauccgcaacaacuucguccaggcccccggcggcgaguucaccguguccccgcggaacgcccccggggagauccuguggagcgcgccccuggggccggaccucaaccccuaccugucccaccuggcccgcauguacaacggcuacgccgggggcuucgaggugcaggucauccucgccgggaacgccuucacggcgggcaaggugaucuucgccgccgugccgcccaacuuccccaccgaggggcugagccccucccaggucaccauguucccccacaucgugguggacguccggcagcuggagcccgugcucaucccgcugcccgacgugcgcaacaacuucuaccacuacaaccagagcaacgaccccaccaucaagcugaucgccaugcucuacacgccccugcgggccaacaacgcgggcgaggacgucuucaccguguccugccgcgugcugacccggccgagccccgacuucgacuucaucuuccucgucccgcccaccguggagucccgcacgaagccguucaccgugcccauccugaccgucgaggagaugaccaacagccgguuccccaucccccuggagaagcucuucacgggcccguccggggccuucgugguccagccccagaacggccgcugcaccaccgacggggugcugcugggcaccacgcagcucagccccgugaacaucugcaccuuccggggcgacgucacccacaucgccgggacccacaacuacacgaugaaccuggccucccagaacuggaacaacuacgacccgaccgaggagauccccgccccgcugggcacccccgacuucguggggcgcauccagggcaugcucacccagacgacccggggcgacgggagcacccgcggccacaaggcgaccguguccacgggggacguccacuucaccccgaagcugggcagcauccaguucaacaccgacaccaacaacgacuucgagacggggcagaacaccaaguucacccccgugggcgugguccaggacgggaacggcacccaccagaacgagccccagcagugggugcugcccuccuacagcggccggacggggcacaacgugcaccucgccccggccgucgcccccaccuuccccggcgagcagcugcuguucuuccgcagcaccaugcccgggugcuccggcuacccgaacaugaaccucgacugccugcugccccaggagugggugcagcacuucuaccaggaggccgcgcccgcccagagcgacguggcccuccugcgguucgucaaccccgacaccgggcgcgugcuguucgagugcaagcuccacaaguccggcuacgugaccgucgcccacacgggccagcacgaccuggugaucccgcccaacggguacuuccgguucgacagcugggugaaccaguucuacacccuggcgccccucggcaacgggaccggccgccggcgcgcccugugaggacuagugcaucacauuuaaaagcaucucagccuaccaugagaauaagagaaagaaaaugaagaucaauagcuuauucaucucuuuuucuuuuucguugguguaaagccaacacccugucuaaaaaacauaaauuucuuuaaucauuuugccucuuuucucugugcuucaauuaauaaaaaauggaaagaaccuagaucuaaaaaaaaaaaaaaaaaaaaaaaaaaaaaaaaaaaaaaaaaaaaaaaaaaaaaaaaaaaaaaaaugcaucccccccccccccccccccccccccccccccaaaggcucuuuucagagccaccagaauu

SEQ ID NO: 1885 - RNA, 910 nt, Artificial Sequence
  mRNA product Design i-2 (A64-N5-C30-hSL-N5) comprising derived and/or modified sequence from RVA/Wa-VirWa/P[8]__ACR22783.1__P2_VP8*(65-223) (opt1) R4509/R4510
ggggcgcugccuacggagguggcagccaucuccuucucggcaucaagcuuaccaugcaguacaucaaggccaacagcaaguucaucggcaucaccgagcugcucgacgggcccuaccagccgacgaccuucaccccgcccaacgacuacuggauccugaucaacagcaacaccaacggcgucguguacgaguccacgaacaacagcgacuucuggaccgccguggucgccaucgagccccacgugaacccgguggaccgccaguacaccaucuucggggaguccaagcaguucaacguccggaacgacagcaacaaguggaaguuccuggagauguuccgcuccagcucccagaacgaguucuacaaccggcgcacccucacgagcgacacccggcuggugggcauccugaaguacggcgggcgcguguggaccuuccacggcgagaccccgcgggccacgaccgacuccagcuccaccgccaaccucaacaacaucagcaucaccauccacuccgaguucuacaucaucccccgcagccaggagagcaagugcaacgaguacaucaacaacgggcugugaggacuagugcaucacauuuaaaagcaucucagccuaccaugagaauaagagaaagaaaaugaagaucaauagcuuauucaucucuuuuucuuuuucguugguguaaagccaacacccugucuaaaaaacauaaauuucuuuaaucauuuugccucuuuucucugugcuucaauuaauaaaaaauggaaagaaccuagaucuaaaaaaaaaaaaaaaaaaaaaaaaaaaaaaaaaaaaaaaaaaaaaaaaaaaaaaaaaaaaaaaaugcaucccccccccccccccccccccccccccccccaaaggcucuuuucagagccaccagaauu

SEQ ID NO: 1886 - RNA, 1150 nt, Artificial Sequence
  mRNA product Design i-2 (A64-N5-C30-hSL-N5) comprising derived and/or modified sequence from RVA/BE1058/P[4]__AEX30665.1__VP8* (opt1) R3705/R3706
ggggcgcugccuacggagguggcagccaucuccuucucggcaucaagcuuaccaugcaguacaucaaggccaacagcaaguucaucggcaucaccgagcuggccagccugaucuaccgccagcuccugaccaacuccuacagcguggaccugcacgacgagaucgagcagaucggcuccgagaagacccagaacgucacggugaaccccgggccguucgcccagacccgguacgcgcccgugaacuggggccacggggagaucaacgacagcaccaccgucgagcccgugcucgacggccccuaccagcccacgaccuucaagccgcccaacgacuacuggcugcugaucuccagcaacaccgacgggguggucuacgaguccaccaacaacagcgacuucuggacggccgugaucgccguggagccccacgucaaccagaccaaccgccaguacgugcucuucggcgagaacaagcaguucaacaucgagaacuccagcgacaaguggaaguucuucgagauguucaagggcaacucccagagcgacuucuccaaccggcgcacccugaccagcuccaaccggcugguggggaugcucaaguacggcgggcgcgucuggacguuccacggcgagaccccgcgggccaccaccgacagcuccagcacggccgaccugaacaacaucuccaucaucauccacagcgaguucuacaucaucccccgcagccaggaguccaagugcaacgaguacaucaacaacgggcugccgcccauccagaacacccggaacguggugccgcucagccuguccagccgcugaggacuagugcaucacauuuaaaagcaucucagccuaccaugagaauaagagaaagaaaaugaagaucaauagcuuauucaucucuuuuucuuuuucguugguguaaagccaacacccugucuaaaaaacauaaauuucuuuaaucauuuugccucuuuucucugugcuucaauuaauaaaaaauggaaagaaccuagaucuaaaaaaaaaaaaaaaaaaaaaaaaaaaaaaaaaaaaaaaaaaaaaaaaaaaaaaaaaaaaaaaaugcaucccccccccccccccccccccccccccccccaaaggcucuuuucagagccaccagaauu

SEQ ID NO: 1887 - RNA, 1150 nt, Artificial Sequence
  mRNA product Design i-2 (A64-N5-C30-hSL-N5) comprising derived and/or modified sequence from RVA/F01322/P[6]__AFA51886.1__VP8* (opt1) R3715/R3716
ggggcgcugccuacggagguggcagccaucuccuucucggcaucaagcuuaccaugcaguacaucaaggccaacagcaaguucaucggcaucaccgagcuggccagccugaucuaccgccagcuccugaccaacuccuacaccguggagcugagcgacgagaucaacacgaucggcuccgagaagaaccagaacgucaccaucaaccccgggcccuucgcccagaccaacuacgcgcccgugaccuggagccacggcgaggugaacgacuccacgaccaucgagcccguccucgacgggcccuaccagccgaccaacuucaagccgcccaacgacuacuggauccugcugaaccccaccaaccagcagguggugcucgagggcacgaacaagaccgacaucugggucgcccugcugcucguggagccgaacgugaccaaccagagccggcaguacacccuguucggggagacgaagcagaucaccgucgagaacaacaccaacaaguggaaguucuucgagauguuccgcuccagcguguccgccgaguuccagcacaagcggacccugacgagcgacaccaagcucgccggcuucaugaaguucuacaacuccguguggaccuuccacggcgagacccccaacgccacgaccgacuacagcuccaccagcaaccuguucgaggucgagaccgugauccacguggaguucuacaucaucccccgcucccaggagagcaagugcuccgaguacaucaacacggggcugcccccgaugcagaacacccggaacaucguccccguggcgcucagcucccgcugaggacuagugcaucacauuuaaaagcaucucagccuaccaugagaauaagagaaagaaaaugaagaucaauagcuuauucaucucuuuuucuuuuucguugguguaaagccaacacccugucuaaaaaacauaaauuucuuuaaucauuuugccucuuuucucugugcuucaauuaauaaaaaauggaaagaaccuagaucuaaaaaaaaaaaaaaaaaaaaaaaaaaaaaaaaaaaaaaaaaaaaaaaaaaaaaaaaaaaaaaaaugcaucccccccccccccccccccccccccccccccaaaggcucuuuucagagccaccagaauu

SEQ ID NO: 1888 - RNA, 1150 nt, Artificial Sequence
  mRNA product Design i-2 (A64-N5-C30-hSL-N5) comprising derived and/or modified sequence from RVA/BE1128/P[8]__AEX30671.1__VP8* (opt1) R3685/R3686
ggggcgcugccuacggagguggcagccaucuccuucucggcaucaagcuuaccaugcaguacaucaaggccaacagcaaguucaucggcaucaccgagcuggccagccugaucuaccgccagcuccugaccaacuccuacagcguggaccugcacgacgagaucgagcagaucggcuccgagaagacccagaacgucacggugaaccccgggcccuucgcccagacccgguacgcgcccgugaacuggggccacggggagaucaacgacagcaccaccgucgagcccauccucgacggcccguaccagccgacgaccuucaccccgcccaccgacuacuggauccugaucacguccaacaccaacggggugguguacgagagcaccaacaacuccgacuucuggaccgccgucaucgccguggagccccacgugaacccggucgaccgccaguacaacguguucggcgagaacaagcaguucaacgugcggaacgacagcgacaaguggaaguuccuggagauguuccgcggcuccagccagaacgacuucuacaaccggcgcacgcucaccuccgacacccggcuggucgggauccugaaguacggcgggcgcguguggaccuuccacggcgagacgccccgggccaccaccgacagcuccaacaccgccaaccucgacgggaucagcaucacgauccacuccgaguucuacaucaucccccgcagccaggaguccaagugcaacgaguacaucaacaacggccugcccccgauccagaacacccggaacguggucccccugagccucuccagccgcugaggacuagugcaucacauuuaaaagcaucucagccuaccaugagaauaagagaaagaaaaugaagaucaauagcuuauucaucucuuuuucuuuuucguugguguaaagccaacacccugucuaaaaaacauaaauuucuuuaaucauuuugccucuuuucucugugcuucaauuaauaaaaaauggaaagaaccuagaucuaaaaaaaaaaaaaaaaaaaaaaaaaaaaaaaaaaaaaaaaaaaaaaaaaaaaaaaaaaaaaaaaugcaucccccccccccccccccccccccccccccccaaaggcucuuuucagagccaccagaauu

SEQ ID NO: 1889 - RNA, 2545 nt, Artificial Sequence
  mRNA product Design i-3 (A64-N5-C30-hSL-N5) comprising derived and/or modified sequence from RVA/Wa-VirWa/P[8]__ACR22783.1__VP4 (opt1) R6937/R6938
gggagaaagcuuaccauggccagccugaucuaccgccagcuccugaccaacuccuacagcguggaccugcacgacgagaucgagcagaucggcuccgagaagacccagaacgucacgaucaaccccagcccguucgcccagacccgguacgcgcccgugaacugggggcacggcgagaucaacgacuccaccaccguggagcccauccucgacgggcccuaccagccgacgaccuucaccccgcccaacgacuacuggauccugaucaacagcaacaccaacggcgucguguacgaguccacgaacaacagcgacuucuggaccgccguggucgccaucgagccccacgugaaccccguggaccgccaguacaccaucuucggggaguccaagcaguucaacguccggaacgacagcaacaaguggaaguuccuggagauguuccgcuccagcucccagaacgaguucuacaaccggcgcacccucacgagcgacacccggcuggugggcauccugaaguacggcgggcgcguguggaccuuccacggcgagacgccccgggccaccaccgacuccagcuccaccgccaaccucaacaacaucagcaucaccauccacuccgaguucuacaucaucccccgcagccaggagagcaagugcaacgaguacaucaacaacgggcugcccccgauccagaacacgcggaacgucgugccccugccccucuccagccgcuccauccaguacaagcgggcccaggugaacgaggacaucaucgucagcaagaccucccuguggaaggagaugcaguacaaccgcgacaucaucauccgguucaaguucggcaacagcaucgugaagaugggcgggcugggcuacaagugguccgagaucagcuacaaggcggccaacuaccaguacaacuaccuccgcgacggggagcaggucaccgcccacaccacgugcuccgugaacggcgugaacaacuucagcuacaacgggggcucccugcccaccgacuucggcaucagccgguacgaggugaucaaggagaacuccuacgucuacguggacuacugggacgacagcaaggcguuccgcaacaugguguacguccggucccuggccgccaaccucaacagcgugaagugcaccgggggcuccuacgacuucagcaucccggucggggccuggcccgugaugaacggcggggccgugucccugcacuucgcgggcgucacccugagcacgcaguucaccgacuucgugagccucaacucccugcgcuuccgguucagccugaccguggacgagccgcccuucuccauccuccgcacccgcacggucaaccuguacggccugcccgccgccaaccccaacaacgggaacgaguacuacgagaucagcggccgguucucccucaucagccuggugcccaccaacgacgacuaccagacccccaucaugaacuccgugaccguccgccaggaccuggagcggcagcucacggaccugcgcgaggaguucaacagccugucccaggagaucgccauggcccagcucaucgaccuggcgcugcucccgcuggacauguucagcauguucuccgggaucaagagcaccaucgaccugaccaaguccauggccaccagcgugaugaagaaguuccggaaguccaagcucgccaccagcaucuccgagaugacgaacagccugagcgacgccgccuccagcgcgucccgcaacgugagcauccgguccaaccugagcgccaucuccaacuggaccaacgucagcaacgacguguccaacgugaccaacagccucaacgacaucuccacccagacgagcaccaucuccaagaagcugcgccugaaggagaugaucacccagaccgagggcaugagcuucgacgacaucuccgccgccguccucaagacgaagaucgacaugagcacccagaucgggaagaacacccugcccgacaucgugaccgaggccuccgagaaguucauccccaagcggagcuaccgcauccugaaggacgacgaggugauggagaucaacacggagggcaaguucuucgcguacaagaucaacaccuucgacgagguccccuucgacgugaacaaguucgccgagcucgugaccgacuccccggucaucagcgccaucaucgacuucaagacccugaagaaccugaacgacaacuacggcaucacgcggaccgaggcccugaaccucaucaagagcaaccccaacaugcugcgcaacuucaucaaccagaacaaccccaucauccggaaccgcaucgagcagcugauccuccagugcaagcugugaggacuaguuauaagacugacuagcccgaugggccucccaacgggcccuccuccccuccuugcaccgagauuaauaaaaaaaaaaaaaaaaaaaaaaaaaaaaaaaaaaaaaaaaaaaaaaaaaaaaaaaaaaaaaaaaugcaucccccccccccccccccccccccccccccccaaaggcucuuuucagagccaccagaauu

SEQ ID NO: 1890 - RNA, 1108 nt, Artificial Sequence
  mRNA product Design i-2 (A64-N5-C30-hSL-N5) comprising derived and/or modified sequence from RVA/F01322/P[6]__AFA51886.1__HsPLAT_VP8*(21-240,N32Q,N56Q,N97Q,N1 11Q,N114Q,N132Q,N171Q,N182Q) (opt1) R5436/R5597
ggggcgcugccuacggagguggcagccaucuccuucucggcaucaagcuuaccauggacgccaugaagcgcggccugugcugcgugcuccugcugugcggggccgucuucgugagcgagaucaacacgaucggcuccgagaagaaccagcaggucaccaucaaccccgggcccuucgcccagaccaacuacgcgcccgugaccuggagccacggcgaggugcaggacuccacgaccaucgagcccguccucgacgggcccuaccagccgaccaacuucaagccgcccaacgacuacuggauccugcugaaccccaccaaccagcagguggugcucgagggcacgcagaagaccgacaucugggucgcccugcugcucguggagccgcaggugacccagcagagccggcaguacacccuguucggggagacgaagcagaucaccgucgagcagaacaccaacaaguggaaguucuucgagauguuccgcuccagcguguccgccgaguuccagcacaagcggacccugacgagcgacaccaagcucgccggcuucaugaaguucuaccaguccguguggaccuuccacggcgagaccccccaggccacgaccgacuacagcuccaccagcaaccuguucgaggucgagaccgugauccacguggaguucuacaucaucccccgcucccaggagagcaagugcuccgaguacaucaacacggggcugcccccgaugcagaacacccggaacaucguccccguggcgcucagcucccgcugaggacuagugcaucacauuuaaaagcaucucagccuaccaugagaauaagagaaagaaaaugaagaucaauagcuuauucaucucuuuuucuuuuucguugguguaaagccaacacccugucuaaaaaacauaaauuucuuuaaucauuuugccucuuuucucugugcuucaauuaauaaaaaauggaaagaaccuagaucuaaaaaaaaaaaaaaaaaaaaaaaaaaaaaaaaaaaaaaaaaaaaaaaaaaaaaaaaaaaaaaaaugcaucccccccccccccccccccccccccccccccaaaggcucuuuucagagccaccagaauu

SEQ ID NO: 1891 - RNA, 1126 nt, Artificial Sequence
  mRNA product Design i-2 (A64-N5-C30-hSL-N5) comprising derived and/or modified sequence from RVA/BE1128/P[8]__AEX30671.1__HsALB_VP8*(2-230) (opt1) R5480/R5481
ggggcgcugccuacggagguggcagccaucuccuucucggcaucaagcuuaccaugaagugggugaccuucaucagccugcucuuccuguucuccagcgccuacuccgccagccugaucuaccgccagcuccugaccaacuccuacagcguggaccugcacgacgagaucgagcagaucggcuccgagaagacccagaacgucacggugaaccccgggcccuucgcccagacccgguacgcgcccgugaacuggggccacggggagaucaacgacagcaccaccgucgagcccauccucgacggcccguaccagccgacgaccuucaccccgcccaccgacuacuggauccugaucacguccaacaccaacggggugguguacgagagcaccaacaacuccgacuucuggaccgccgucaucgccguggagccccacgugaacccggucgaccgccaguacaacguguucggcgagaacaagcaguucaacgugcggaacgacagcgacaaguggaaguuccuggagauguuccgcggcuccagccagaacgacuucuacaaccggcgcacgcucaccuccgacacccggcuggucgggauccugaaguacggcgggcgcguguggaccuuccacggcgagacgccccgggccaccaccgacagcuccaacaccgccaaccucgacgggaucagcaucacgauccacuccgaguucuacaucaucccccgcagccaggaguccaagugcaacgaguacaucaacaacggccugcccccgauccagaacacccggugaggacuagugcaucacauuuaaaagcaucucagccuaccaugagaauaagagaaagaaaaugaagaucaauagcuuauucaucucuuuuucuuuuucguugguguaaagccaacacccugucuaaaaaacauaaauuucuuuaaucauuuugccucuuuucucugugcuucaauuaauaaaaaauggaaagaaccuagaucuaaaaaaaaaaaaaaaaaaaaaaaaaaaaaaaaaaaaaaaaaaaaaaaaaaaaaaaaaaaaaaaaugcaucccccccccccccccccccccccccccccccaaaggcucuuuucagagccaccagaauu

SEQ ID NO: 1892 - RNA, 1078 nt, Artificial Sequence
  mRNA product Design i-2 (A64-N5-C30-hSL-N5) comprising derived and/or modified sequence from RVA/BE1128/P[8]__AEX30671.1__HsALB_VP8*(11-223) (opt1) R5482/R5483
ggggcgcugccuacggagguggcagccaucuccuucucggcaucaagcuuaccaugaagugggugaccuucaucagccugcucuuccuguucuccagcgccuacuccaccaacuccuacagcguggaccugcacgacgagaucgagcagaucggcuccgagaagacccagaacgucacggugaaccccgggcccuucgcccagacccgguacgcgcccgugaacuggggccacggggagaucaacgacagcaccaccgucgagcccauccucgacggcccguaccagccgacgaccuucaccccgcccaccgacuacuggauccugaucacguccaacaccaacggggugguguacgagagcaccaacaacuccgacuucuggaccgccgucaucgccguggagccccacgugaacccggucgaccgccaguacaacguguucggcgagaacaagcaguucaacgugcggaacgacagcgacaaguggaaguuccuggagauguuccgcggcuccagccagaacgacuucuacaaccggcgcacgcucaccuccgacacccggcuggucgggauccugaaguacggcgggcgcguguggaccuuccacggcgagacgccccgggccaccaccgacagcuccaacaccgccaaccucgacgggaucagcaucacgauccacuccgaguucuacaucaucccccgcagccaggaguccaagugcaacgaguacaucaacaacggccugugaggacuagugcaucacauuuaaaagcaucucagccuaccaugagaauaagagaaagaaaaugaagaucaauagcuuauucaucucuuuuucuuuuucguugguguaaagccaacacccugucuaaaaaacauaaauuucuuuaaucauuuugccucuuuucucugugcuucaauuaauaaaaaauggaaagaaccuagaucuaaaaaaaaaaaaaaaaaaaaaaaaaaaaaaaaaaaaaaaaaaaaaaaaaaaaaaaaaaaaaaaaugcaucccccccccccccccccccccccccccccccaaaggcucuuuucagagccaccagaauu

SEQ ID NO: 1893 - RNA, 988 nt, Artificial Sequence
  mRNA product Design i-2 (A64-N5-C30-hSL-N5) comprising derived and/or modified sequence from RVA/BE1128/P[8]__AEX30671.1__HsALB_VP8*(41-223) (opt1) R5484/R5485
ggggcgcugccuacggagguggcagccaucuccuucucggcaucaagcuuaccaugaagugggugaccuucaucagccugcucuuccuguucuccagcgccuacuccgcccagacccgguacgcgcccgugaacuggggccacggggagaucaacgacagcaccaccgucgagcccauccucgacggcccguaccagccgacgaccuucaccccgcccaccgacuacuggauccugaucacguccaacaccaacggggugguguacgagagcaccaacaacuccgacuucuggaccgccgucaucgccguggagccccacgugaacccggucgaccgccaguacaacguguucggcgagaacaagcaguucaacgugcggaacgacagcgacaaguggaaguuccuggagauguuccgcggcuccagccagaacgacuucuacaaccggcgcacgcucaccuccgacacccggcuggucgggauccugaaguacggcgggcgcguguggaccuuccacggcgagacgccccgggccaccaccgacagcuccaacaccgccaaccucgacgggaucagcaucacgauccacuccgaguucuacaucaucccccgcagccaggaguccaagugcaacgaguacaucaacaacggccugugaggacuagugcaucacauuuaaaagcaucucagccuaccaugagaauaagagaaagaaaaugaagaucaauagcuuauucaucucuuuuucuuuuucguugguguaaagccaacacccugucuaaaaaacauaaauuucuuuaaucauuuugccucuuuucucugugcuucaauuaauaaaaaauggaaagaaccuagaucuaaaaaaaaaaaaaaaaaaaaaaaaaaaaaaaaaaaaaaaaaaaaaaaaaaaaaaaaaaaaaaaaugcaucccccccccccccccccccccccccccccccaaaggcucuuuucagagccaccagaauu

SEQ ID NO: 1894 - RNA, 1048 nt, Artificial Sequence
  mRNA product Design i-2 (A64-N5-C30-hSL-N5) comprising derived and/or modified sequence from RVA/BE1128/P[8]__AEX30671.1__HsALB_P2_VP8*(41-223) (opt1) R5486/R5487
ggggcgcugccuacggagguggcagccaucuccuucucggcaucaagcuuaccaugaagugggugaccuucaucagccugcucuuccuguucuccagcgccuacucccaguacaucaaggccaacagcaaguucaucggcaucaccgagcugggcagcggguccggcgcccagacccgguacgcgcccgugaacuggggccacggggagaucaacgacagcaccaccgucgagcccauccucgacggcccguaccagccgacgaccuucaccccgcccaccgacuacuggauccugaucacguccaacaccaacggggugguguacgagagcaccaacaacuccgacuucuggaccgccgucaucgccguggagccccacgugaacccggucgaccgccaguacaacguguucggcgagaacaagcaguucaacgugcggaacgacagcgacaaguggaaguuccuggagauguuccgcggcuccagccagaacgacuucuacaaccggcgcacgcucaccuccgacacccggcuggucgggauccugaaguacggcgggcgcguguggaccuuccacggcgagacgccccgggccaccaccgacagcuccaacaccgccaaccucgacgggaucagcaucacgauccacuccgaguucuacaucaucccccgcagccaggaguccaagugcaacgaguacaucaacaacggccugugaggacuagugcaucacauuuaaaagcaucucagccuaccaugagaauaagagaaagaaaaugaagaucaauagcuuauucaucucuuuuucuuuuucguugguguaaagccaacacccugucuaaaaaacauaaauuucuuuaaucauuuugccucuuuucucugugcuucaauuaauaaaaaauggaaagaaccuagaucuaaaaaaaaaaaaaaaaaaaaaaaaaaaaaaaaaaaaaaaaaaaaaaaaaaaaaaaaaaaaaaaaugcaucccccccccccccccccccccccccccccccaaaggcucuuuucagagccaccagaauu

SEQ ID NO: 1895 - RNA, 997 nt, Artificial Sequence
  mRNA product Design i-2 (A64-N5-C30-hSL-N5) comprising derived and/or modified sequence from RVA/F01322/P[6]__AFA51886.1__HsPLAT_VP8*(41-223) (opt1) R5433/R5594
ggggcgcugccuacggagguggcagccaucuccuucucggcaucaagcuuaccauggacgccaugaagcgcggccugugcugcgugcuccugcugugcggggccgucuucgugagcgcccagaccaacuacgcgcccgugaccuggagccacggcgaggugaacgacuccacgaccaucgagcccguccucgacgggcccuaccagccgaccaacuucaagccgcccaacgacuacuggauccugcugaaccccaccaaccagcagguggugcucgagggcacgaacaagaccgacaucugggucgcccugcugcucguggagccgaacgugaccaaccagagccggcaguacacccuguucggggagacgaagcagaucaccgucgagaacaacaccaacaaguggaaguucuucgagauguuccgcuccagcguguccgccgaguuccagcacaagcggacccugacgagcgacaccaagcucgccggcuucaugaaguucuacaacuccguguggaccuuccacggcgagacccccaacgccacgaccgacuacagcuccaccagcaaccuguucgaggucgagaccgugauccacguggaguucuacaucaucccccgcucccaggagagcaagugcuccgaguacaucaacacggggcugugaggacuagugcaucacauuuaaaagcaucucagccuaccaugagaauaagagaaagaaaaugaagaucaauagcuuauucaucucuuuuucuuuuucguugguguaaagccaacacccugucuaaaaaacauaaauuucuuuaaucauuuugccucuuuucucugugcuucaauuaauaaaaaauggaaagaaccuagaucuaaaaaaaaaaaaaaaaaaaaaaaaaaaaaaaaaaaaaaaaaaaaaaaaaaaaaaaaaaaaaaaaugcaucccccccccccccccccccccccccccccccaaaggcucuuuucagagccaccagaauu

SEQ ID NO: 1896 - RNA, 1057 nt, Artificial Sequence
  mRNA product Design i-2 (A64-N5-C30-hSL-N5) comprising derived and/or modified sequence from RVA/F01322/P[6]__AFA51886.1__HsPLAT_P2_VP8*(41-223) (opt1) R5434/R5595
ggggcgcugccuacggagguggcagccaucuccuucucggcaucaagcuuaccauggacgccaugaagcgcggccugugcugcgugcuccugcugugcggggccgucuucgugagccaguacaucaaggccaacagcaaguucaucggcaucaccgagcugggcagcggguccggcgcccagaccaacuacgcgcccgugaccuggagccacggcgaggugaacgacuccacgaccaucgagcccguccucgacgggcccuaccagccgaccaacuucaagccgcccaacgacuacuggauccugcugaaccccaccaaccagcagguggugcucgagggcacgaacaagaccgacaucugggucgcccugcugcucguggagccgaacgugaccaaccagagccggcaguacacccuguucggggagacgaagcagaucaccgucgagaacaacaccaacaaguggaaguucuucgagauguuccgcuccagcguguccgccgaguuccagcacaagcggacccugacgagcgacaccaagcucgccggcuucaugaaguucuacaacuccguguggaccuuccacggcgagacccccaacgccacgaccgacuacagcuccaccagcaaccuguucgaggucgagaccgugauccacguggaguucuacaucaucccccgcucccaggagagcaagugcuccgaguacaucaacacggggcugugaggacuagugcaucacauuuaaaagcaucucagccuaccaugagaauaagagaaagaaaaugaagaucaauagcuuauucaucucuuuuucuuuuucguugguguaaagccaacacccugucuaaaaaacauaaauuucuuuaaucauuuugccucuuuucucugugcuucaauuaauaaaaaauggaaagaaccuagaucuaaaaaaaaaaaaaaaaaaaaaaaaaaaaaaaaaaaaaaaaaaaaaaaaaaaaaaaaaaaaaaaaugcaucccccccccccccccccccccccccccccccaaaggcucuuuucagagccaccagaauu

SEQ ID NO: 1897 - RNA, 1135 nt, Artificial Sequence
  mRNA product Design i-2 (A64-N5-C30-hSL-N5) comprising derived and/or modified sequence from RVA/F01322/P[6]__AFA51886.1__HsPLAT_VP8*(2-230) (opt1) R5435/R5596
ggggcgcugccuacggagguggcagccaucuccuucucggcaucaagcuuaccauggacgccaugaagcgcggccugugcugcgugcuccugcugugcggggccgucuucgugagcgccagccugaucuaccgccagcuccugaccaacuccuacaccguggagcugagcgacgagaucaacacgaucggcuccgagaagaaccagaacgucaccaucaaccccgggcccuucgcccagaccaacuacgcgcccgugaccuggagccacggcgaggugaacgacuccacgaccaucgagcccguccucgacgggcccuaccagccgaccaacuucaagccgcccaacgacuacuggauccugcugaaccccaccaaccagcagguggugcucgagggcacgaacaagaccgacaucugggucgcccugcugcucguggagccgaacgugaccaaccagagccggcaguacacccuguucggggagacgaagcagaucaccgucgagaacaacaccaacaaguggaaguucuucgagauguuccgcuccagcguguccgccgaguuccagcacaagcggacccugacgagcgacaccaagcucgccggcuucaugaaguucuacaacuccguguggaccuuccacggcgagacccccaacgccacgaccgacuacagcuccaccagcaaccuguucgaggucgagaccgugauccacguggaguucuacaucaucccccgcucccaggagagcaagugcuccgaguacaucaacacggggcugcccccgaugcagaacacccggugaggacuagugcaucacauuuaaaagcaucucagccuaccaugagaauaagagaaagaaaaugaagaucaauagcuuauucaucucuuuuucuuuuucguugguguaaagccaacacccugucuaaaaaacauaaauuucuuuaaucauuuugccucuuuucucugugcuucaauuaauaaaaaauggaaagaaccuagaucuaaaaaaaaaaaaaaaaaaaaaaaaaaaaaaaaaaaaaaaaaaaaaaaaaaaaaaaaaaaaaaaaugcaucccccccccccccccccccccccccccccccaaaggcucuuuucagagccaccagaauu

SEQ ID NO: 1898 - RNA, 897 nt, Artificial Sequence
  mRNA product Design i-2 (A100) comprising derived and/or modified sequence from RVA/BE1128/P[8]__AEX30671.1__P2_VP8*(65-223) (opt1) R8138
ggggcgcugccuacggagguggcagccaucuccuucucggcaucaagcuuaccaugcaguacaucaaggccaacagcaaguucaucggcaucaccgagcugggcagcggguccggccucgacggcccguaccagccgacgaccuucaccccgcccaccgacuacuggauccugaucacguccaacaccaacggggugguguacgagagcaccaacaacuccgacuucuggaccgccgucaucgccguggagccccacgugaacccggucgaccgccaguacaacguguucggcgagaacaagcaguucaacgugcggaacgacagcgacaaguggaaguuccuggagauguuccgcggcuccagccagaacgacuucuacaaccggcgcacgcucaccuccgacacccggcuggucgggauccugaaguacggcgggcgcguguggaccuuccacggcgagacgccccgggccaccaccgacagcuccaacaccgccaaccucgacgggaucagcaucacgauccacuccgaguucuacaucaucccccgcagccaggaguccaagugcaacgaguacaucaacaacggccugugaggacuagugcaucacauuuaaaagcaucucagccuaccaugagaauaagagaaagaaaaugaagaucaauagcuuauucaucucuuuuucuuuuucguugguguaaagccaacacccugucuaaaaaacauaaauuucuuuaaucauuuugccucuuuucucugugcuucaauuaauaaaaaauggaaagaaccuagaucuaaaaaaaaaaaaaaaaaaaaaaaaaaaaaaaaaaaaaaaaaaaaaaaaaaaaaaaaaaaaaaaaaaaaaaaaaaaaaaaaaaaaaaaaaaaaaaaaaaaa

SEQ ID NO: 1899 - protein, 181 aa, Artificial Sequence
  derived and/or modified protein sequence (artificial) from RVA/BE1058/P[4]__AEX30665.1__P2_VP8*(64-223)
MQYIKANSKFIGITELGSGSGVLDGPYQPTTFKPPNDYWLLISSNTDGVVYESTNNSDFWTAVIAVEPHVNQTNRQYVLFGENKQFNIENSSDKWKFFEMFKGNSQSDFSNRRTLTSSNRLVGMLKYGGRVWTFHGETPRATTDSSSTADLNNISIIIHSEFYIIPRSQESKCNEYINNGL

SEQ ID NO: 1900 - protein, 181 aa, Artificial Sequence
  derived and/or modified protein sequence (artificial) from RVA/F01322/P[6]__AFA51886.1__P2_VP8*(64-223)
MQYIKANSKFIGITELGSGSGVLDGPYQPTNFKPPNDYWILLNPTNQQVVLEGTNKTDIWVALLLVEPNVTNQSRQYTLFGETKQITVENNTNKWKFFEMFRSSVSAEFQHKRTLTSDTKLAGFMKFYNSVWTFHGETPNATTDYSSTSNLFEVETVIHVEFYIIPRSQESKCSEYINTGL

SEQ ID NO: 1901 - RNA, 546 nt, Artificial Sequence
  derived and/or modified CDS sequence (opt1) from RVA/BE1058/P[4]__AEX30665.1__P2_VP8*(64-223)
augcaguacaucaaggccaacagcaaguucaucggcaucaccgagcugggcagcggguccggcgugcucgacggccccuaccagccgacgaccuucaagccgcccaacgacuacuggcugcugaucuccagcaacaccgacgggguggucuacgaguccaccaacaacagcgacuucuggacggccgugaucgccguggagccccacgucaaccagaccaaccgccaguacguccucuucggcgagaacaagcaguucaacaucgagaacuccagcgacaaguggaaguucuucgagauguucaagggcaacucccagagcgacuucuccaaccggcgcacccugaccagcuccaaccggcugguggggaugcucaaguacggcgggcgcguguggacguuccacggcgagacgccccgggccaccaccgacagcuccagcaccgccgaccugaacaacaucuccaucaucauccacagcgaguucuacaucaucccccgcagccaggaguccaagugcaacgaguacaucaacaacgggcuguga

SEQ ID NO: 1902 - RNA, 546 nt, Artificial Sequence
  derived and/or modified CDS sequence (opt1) from RVA/F01322/P[6]__AFA51886.1__P2_VP8*(64-223)
augcaguacaucaaggccaacagcaaguucaucggcaucaccgagcugggcagcggguccggcguccucgacgggcccuaccagccgaccaacuucaagccgcccaacgacuacuggauccugcugaaccccaccaaccagcaggucgugcucgagggcacgaacaagaccgacaucuggguggcccugcugcucguggagcccaacgugaccaaccagagccggcaguacacccuguucggggagacgaagcagaucaccgucgagaacaacaccaacaaguggaaguucuucgagauguuccgcuccagcguguccgccgaguuccagcacaagcggacccugacgagcgacaccaagcucgccggcuucaugaaguucuacaacuccguguggaccuuccacggcgagacccccaacgccacgaccgacuacagcuccaccagcaaccuguucgaggucgagaccgugauccacguggaguucuacaucaucccccgcucccaggagagcaagugcuccgaguacaucaacacggggcuguga

SEQ ID NO: 1903 - RNA, 543 nt, Artificial Sequence
  derived and/or modified CDS sequence (opt1) from RVA/BE1058/P[4]__AEX30665.1__P2_VP8*(65-223)
augcaguacaucaaggccaacagcaaguucaucggcaucaccgagcugggcagcggguccggccucgacggccccuaccagccgacgaccuucaagccgcccaacgacuacuggcugcugaucuccagcaacaccgacgggguggucuacgaguccaccaacaacagcgacuucuggacggccgugaucgccguggagccccacgucaaccagaccaaccgccaguacguccucuucggcgagaacaagcaguucaacaucgagaacuccagcgacaaguggaaguucuucgagauguucaagggcaacucccagagcgacuucuccaaccggcgcacccugaccagcuccaaccggcugguggggaugcucaaguacggcgggcgcguguggacguuccacggcgagacgccccgggccaccaccgacagcuccagcaccgccgaccugaacaacaucuccaucaucauccacagcgaguucuacaucaucccccgcagccaggaguccaagugcaacgaguacaucaacaacgggcuguga

SEQ ID NO: 1904 - RNA, 543 nt, Artificial Sequence
  derived and/or modified CDS sequence (opt1) from RVA/F01322/P[6]__AFA51886.1__P2_VP8*(65-223)
augcaguacaucaaggccaacagcaaguucaucggcaucaccgagcugggcagcggguccggccucgacgggcccuaccagccgaccaacuucaagccgcccaacgacuacuggauccugcugaaccccaccaaccagcaggucgugcucgagggcacgaacaagaccgacaucuggguggcccugcugcucguggagcccaacgugaccaaccagagccggcaguacacccuguucggggagacgaagcagaucaccgucgagaacaacaccaacaaguggaaguucuucgagauguuccgcuccagcguguccgccgaguuccagcacaagcggacccugacgagcgacaccaagcucgccggcuucaugaaguucuacaacuccguguggaccuuccacggcgagacccccaacgccacgaccgacuacagcuccaccagcaaccuguucgaggucgagaccgugauccacguggaguucuacaucaucccccgcucccaggagagcaagugcuccgaguacaucaacacggggcuguga

SEQ ID NO: 1905 - RNA, 1119 nt, Artificial Sequence
  derived and/or modified CDS sequence (opt1) from RVA/BE1058/P[4]__AEX30665.1__LumSynt_P2_VP8*(41-223)
augcagaucuacgagggcaagcugaccgccgaggggcuccgcuucggcaucguggccagccgguucaaccacgcgcuggucgaccgccugguggagggggccaucgacgccaucgugcggcacggcgggcgcgaggaggacaucacccucguccgggugcccggcuccugggagaucccgguggccgccggcgagcuggcccgcaaggaggacaucgacgcggucaucgccaucggggugcugauccggggcgccacgccccacuucgacuacaucgccagcgagguguccaaggggcucgcggaccugagccuggagcuccgcaagcccaucaccuucggcgucaucaccgccgacacccuggagcaggccaucgagcgggccgggacgaagcacggcaacaagggcugggaggccgcgcuguccgccaucgagauggccaaccucuucaagagccugcgcggcgggagcggcggguccggcgggagcggcggcuccgggggcgggcaguacaucaaggccaacagcaaguucaucggcaucaccgagcugggcagcggguccggcgcccagacccgguacgcgcccgugaacuggggccacggggagaucaacgacagcaccaccgucgagcccgugcucgacggccccuaccagccgacgaccuucaagccgcccaacgacuacuggcugcugaucuccagcaacaccgacgggguggucuacgaguccaccaacaacagcgacuucuggacggccgugaucgccguggagccccacgucaaccagaccaaccgccaguacguccucuucggcgagaacaagcaguucaacaucgagaacuccagcgacaaguggaaguucuucgagauguucaagggcaacucccagagcgacuucuccaaccggcgcacccugaccagcuccaaccggcugguggggaugcucaaguacggcgggcgcguguggacguuccacggcgagacgccccgggccaccaccgacagcuccagcaccgccgaccugaacaacaucuccaucaucauccacagcgaguucuacaucaucccccgcagccaggaguccaagugcaacgaguacaucaacaacgggcuguga

SEQ ID NO: 1906 - RNA, 1119 nt, Artificial Sequence
  derived and/or modified CDS sequence (opt1) from RVA/F01322/P[6]__AFA51886.1__LumSynt_P2_VP8*(41-223)
augcagaucuacgagggcaagcugaccgccgaggggcuccgcuucggcaucguggccagccgguucaaccacgcgcuggucgaccgccugguggagggggccaucgacgccaucgugcggcacggcgggcgcgaggaggacaucacccucguccgggugcccggcuccugggagaucccgguggccgccggcgagcuggcccgcaaggaggacaucgacgcggucaucgccaucggggugcugauccggggcgccacgccccacuucgacuacaucgccagcgagguguccaaggggcucgcggaccugagccuggagcuccgcaagcccaucaccuucggcgucaucaccgccgacacccuggagcaggccaucgagcgggccgggacgaagcacggcaacaagggcugggaggccgcgcuguccgccaucgagauggccaaccucuucaagagccugcgcggcgggagcggcggguccggcgggagcggcggcuccgggggcgggcaguacaucaaggccaacagcaaguucaucggcaucaccgagcugggcagcggguccggcgcccagaccaacuacgcgcccgugaccuggagccacggcgaggugaacgacuccacgaccaucgagcccguccucgacgggcccuaccagccgaccaacuucaagccgcccaacgacuacuggauccugcugaaccccaccaaccagcaggucgugcucgagggcacgaacaagaccgacaucuggguggcccugcugcucguggagcccaacgugaccaaccagagccggcaguacacccuguucggggagacgaagcagaucaccgucgagaacaacaccaacaaguggaaguucuucgagauguuccgcuccagcguguccgccgaguuccagcacaagcggacccugacgagcgacaccaagcucgccggcuucaugaaguucuacaacuccguguggaccuuccacggcgagacccccaacgccacgaccgacuacagcuccaccagcaaccuguucgaggucgagaccgugauccacguggaguucuacaucaucccccgcucccaggagagcaagugcuccgaguacaucaacacggggcucuga

SEQ ID NO: 1907 - RNA, 794 nt, Artificial Sequence
  mRNA product Design a-1 (A100) comprising derived and/or modified sequence from RVA/BE1058/P[4]__AEX30665.1__P2_VP8*(64-223) (opt1)
aggagagucccgcagucggcguccagcggcucugcuuguucgugugugugucguugcaggccuuauucaagcuuaccaugcaguacaucaaggccaacagcaaguucaucggcaucaccgagcugggcagcggguccggcgugcucgacggccccuaccagccgacgaccuucaagccgcccaacgacuacuggcugcugaucuccagcaacaccgacgggguggucuacgaguccaccaacaacagcgacuucuggacggccgugaucgccguggagccccacgucaaccagaccaaccgccaguacguccucuucggcgagaacaagcaguucaacaucgagaacuccagcgacaaguggaaguucuucgagauguucaagggcaacucccagagcgacuucuccaaccggcgcacccugaccagcuccaaccggcugguggggaugcucaaguacggcgggcgcguguggacguuccacggcgagacgccccgggccaccaccgacagcuccagcaccgccgaccugaacaacaucuccaucaucauccacagcgaguucuacaucaucccccgcagccaggaguccaagugcaacgaguacaucaacaacgggcugugaggacuagucccuguucccagagcccacuuuuuuuucuuuuuuugaaauaaaauagccugucuuucagaucuaaaaaaaaaaaaaaaaaaaaaaaaaaaaaaaaaaaaaaaaaaaaaaaaaaaaaaaaaaaaaaaaaaaaaaaaaaaaaaaaaaaaaaaaaaaaaaaaaaaa

SEQ ID NO: 1908 - RNA, 794 nt, Artificial Sequence
  mRNA product Design a-1 (A100) comprising derived and/or modified sequence from RVA/F01322/P[6]__AFA51886.1__P2_VP8*(64-223) (opt1)
aggagagucccgcagucggcguccagcggcucugcuuguucgugugugugucguugcaggccuuauucaagcuuaccaugcaguacaucaaggccaacagcaaguucaucggcaucaccgagcugggcagcggguccggcguccucgacgggcccuaccagccgaccaacuucaagccgcccaacgacuacuggauccugcugaaccccaccaaccagcaggucgugcucgagggcacgaacaagaccgacaucuggguggcccugcugcucguggagcccaacgugaccaaccagagccggcaguacacccuguucggggagacgaagcagaucaccgucgagaacaacaccaacaaguggaaguucuucgagauguuccgcuccagcguguccgccgaguuccagcacaagcggacccugacgagcgacaccaagcucgccggcuucaugaaguucuacaacuccguguggaccuuccacggcgagacccccaacgccacgaccgacuacagcuccaccagcaaccuguucgaggucgagaccgugauccacguggaguucuacaucaucccccgcucccaggagagcaagugcuccgaguacaucaacacggggcugugaggacuagucccuguucccagagcccacuuuuuuuucuuuuuuugaaauaaaauagccugucuuucagaucuaaaaaaaaaaaaaaaaaaaaaaaaaaaaaaaaaaaaaaaaaaaaaaaaaaaaaaaaaaaaaaaaaaaaaaaaaaaaaaaaaaaaaaaaaaaaaaaaaaaa

SEQ ID NO: 1909 - RNA, 791 nt, Artificial Sequence
  mRNA product Design a-1 (A100) comprising derived and/or modified sequence from RVA/BE1058/P[4]__AEX30665.1__P2_VP8*(65-223) (opt1)
aggagagucccgcagucggcguccagcggcucugcuuguucgugugugugucguugcaggccuuauucaagcuuaccaugcaguacaucaaggccaacagcaaguucaucggcaucaccgagcugggcagcggguccggccucgacggccccuaccagccgacgaccuucaagccgcccaacgacuacuggcugcugaucuccagcaacaccgacgggguggucuacgaguccaccaacaacagcgacuucuggacggccgugaucgccguggagccccacgucaaccagaccaaccgccaguacguccucuucggcgagaacaagcaguucaacaucgagaacuccagcgacaaguggaaguucuucgagauguucaagggcaacucccagagcgacuucuccaaccggcgcacccugaccagcuccaaccggcugguggggaugcucaaguacggcgggcgcguguggacguuccacggcgagacgccccgggccaccaccgacagcuccagcaccgccgaccugaacaacaucuccaucaucauccacagcgaguucuacaucaucccccgcagccaggaguccaagugcaacgaguacaucaacaacgggcugugaggacuagucccuguucccagagcccacuuuuuuuucuuuuuuugaaauaaaauagccugucuuucagaucuaaaaaaaaaaaaaaaaaaaaaaaaaaaaaaaaaaaaaaaaaaaaaaaaaaaaaaaaaaaaaaaaaaaaaaaaaaaaaaaaaaaaaaaaaaaaaaaaaaaa

SEQ ID NO: 1910 - RNA, 791 nt, Artificial Sequence
  mRNA product Design a-1 (A100) comprising derived and/or modified sequence from RVA/F01322/P[6]__AFA51886.1__P2_VP8*(65-223) (opt1)
aggagagucccgcagucggcguccagcggcucugcuuguucgugugugugucguugcaggccuuauucaagcuuaccaugcaguacaucaaggccaacagcaaguucaucggcaucaccgagcugggcagcggguccggccucgacgggcccuaccagccgaccaacuucaagccgcccaacgacuacuggauccugcugaaccccaccaaccagcaggucgugcucgagggcacgaacaagaccgacaucuggguggcccugcugcucguggagcccaacgugaccaaccagagccggcaguacacccuguucggggagacgaagcagaucaccgucgagaacaacaccaacaaguggaaguucuucgagauguuccgcuccagcguguccgccgaguuccagcacaagcggacccugacgagcgacaccaagcucgccggcuucaugaaguucuacaacuccguguggaccuuccacggcgagacccccaacgccacgaccgacuacagcuccaccagcaaccuguucgaggucgagaccgugauccacguggaguucuacaucaucccccgcucccaggagagcaagugcuccgaguacaucaacacggggcugugaggacuagucccuguucccagagcccacuuuuuuuucuuuuuuugaaauaaaauagccugucuuucagaucuaaaaaaaaaaaaaaaaaaaaaaaaaaaaaaaaaaaaaaaaaaaaaaaaaaaaaaaaaaaaaaaaaaaaaaaaaaaaaaaaaaaaaaaaaaaaaaaaaaaa

SEQ ID NO: 1911 - RNA, 1367 nt, Artificial Sequence
  mRNA product Design a-1 (A100) comprising derived and/or modified sequence from RVA/BE1058/P[4]__AEX30665.1__LumSynt_P2_VP8*(41-223) (opt1)
aggagagucccgcagucggcguccagcggcucugcuuguucgugugugugucguugcaggccuuauucaagcuuaccaugcagaucuacgagggcaagcugaccgccgaggggcuccgcuucggcaucguggccagccgguucaaccacgcgcuggucgaccgccugguggagggggccaucgacgccaucgugcggcacggcgggcgcgaggaggacaucacccucguccgggugcccggcuccugggagaucccgguggccgccggcgagcuggcccgcaaggaggacaucgacgcggucaucgccaucggggugcugauccggggcgccacgccccacuucgacuacaucgccagcgagguguccaaggggcucgcggaccugagccuggagcuccgcaagcccaucaccuucggcgucaucaccgccgacacccuggagcaggccaucgagcgggccgggacgaagcacggcaacaagggcugggaggccgcgcuguccgccaucgagauggccaaccucuucaagagccugcgcggcgggagcggcggguccggcgggagcggcggcuccgggggcgggcaguacaucaaggccaacagcaaguucaucggcaucaccgagcugggcagcggguccggcgcccagacccgguacgcgcccgugaacuggggccacggggagaucaacgacagcaccaccgucgagcccgugcucgacggccccuaccagccgacgaccuucaagccgcccaacgacuacuggcugcugaucuccagcaacaccgacgggguggucuacgaguccaccaacaacagcgacuucuggacggccgugaucgccguggagccccacgucaaccagaccaaccgccaguacguccucuucggcgagaacaagcaguucaacaucgagaacuccagcgacaaguggaaguucuucgagauguucaagggcaacucccagagcgacuucuccaaccggcgcacccugaccagcuccaaccggcugguggggaugcucaaguacggcgggcgcguguggacguuccacggcgagacgccccgggccaccaccgacagcuccagcaccgccgaccugaacaacaucuccaucaucauccacagcgaguucuacaucaucccccgcagccaggaguccaagugcaacgaguacaucaacaacgggcugugaggacuagucccuguucccagagcccacuuuuuuuucuuuuuuugaaauaaaauagccugucuuucagaucuaaaaaaaaaaaaaaaaaaaaaaaaaaaaaaaaaaaaaaaaaaaaaaaaaaaaaaaaaaaaaaaaaaaaaaaaaaaaaaaaaaaaaaaaaaaaaaaaaaaa

SEQ ID NO: 1912 - RNA, 1367 nt, Artificial Sequence
  mRNA product Design a-1 (A100) comprising derived and/or modified sequence from RVA/F01322/P[6]__AFA51886.1__LumSynt_P2_VP8*(41-223) (opt1)
aggagagucccgcagucggcguccagcggcucugcuuguucgugugugugucguugcaggccuuauucaagcuuaccaugcagaucuacgagggcaagcugaccgccgaggggcuccgcuucggcaucguggccagccgguucaaccacgcgcuggucgaccgccugguggagggggccaucgacgccaucgugcggcacggcgggcgcgaggaggacaucacccucguccgggugcccggcuccugggagaucccgguggccgccggcgagcuggcccgcaaggaggacaucgacgcggucaucgccaucggggugcugauccggggcgccacgccccacuucgacuacaucgccagcgagguguccaaggggcucgcggaccugagccuggagcuccgcaagcccaucaccuucggcgucaucaccgccgacacccuggagcaggccaucgagcgggccgggacgaagcacggcaacaagggcugggaggccgcgcuguccgccaucgagauggccaaccucuucaagagccugcgcggcgggagcggcggguccggcgggagcggcggcuccgggggcgggcaguacaucaaggccaacagcaaguucaucggcaucaccgagcugggcagcggguccggcgcccagaccaacuacgcgcccgugaccuggagccacggcgaggugaacgacuccacgaccaucgagcccguccucgacgggcccuaccagccgaccaacuucaagccgcccaacgacuacuggauccugcugaaccccaccaaccagcaggucgugcucgagggcacgaacaagaccgacaucuggguggcccugcugcucguggagcccaacgugaccaaccagagccggcaguacacccuguucggggagacgaagcagaucaccgucgagaacaacaccaacaaguggaaguucuucgagauguuccgcuccagcguguccgccgaguuccagcacaagcggacccugacgagcgacaccaagcucgccggcuucaugaaguucuacaacuccguguggaccuuccacggcgagacccccaacgccacgaccgacuacagcuccaccagcaaccuguucgaggucgagaccgugauccacguggaguucuacaucaucccccgcucccaggagagcaagugcuccgaguacaucaacacggggcucugaggacuagucccuguucccagagcccacuuuuuuuucuuuuuuugaaauaaaauagccugucuuucagaucuaaaaaaaaaaaaaaaaaaaaaaaaaaaaaaaaaaaaaaaaaaaaaaaaaaaaaaaaaaaaaaaaaaaaaaaaaaaaaaaaaaaaaaaaaaaaaaaaaaaa

SEQ ID NO: 1913 - RNA, 251 nt, Artificial Sequence
  mRNA product Design i-3 (A100) comprising derived and/or modified sequence from RVA/BE1058/P[4]__AEX30665.1__P2_VP8*(64-223) (opt1)
aggagaaagcuuaccgucccgcagucggcguccagcggcucugcuuguucgugugugugucguugcaggccuuauucggacuaguuauaagacugacuagcccgaugggccucccaacgggcccuccuccccuccuugcaccgagauuaauaaaaaaaaaaaaaaaaaaaaaaaaaaaaaaaaaaaaaaaaaaaaaaaaaaaaaaaaaaaaaaaaaaaaaaaaaaaaaaaaaaaaaaaaaaaaaaaaaaaa

SEQ ID NO: 1914 - RNA, 251 nt, Artificial Sequence; identical to SEQ ID NO: 1913
  mRNA product Design i-3 (A100) comprising derived and/or modified sequence from RVA/F01322/P[6]__AFA51886.1__P2_VP8*(64-223) (opt1)

SEQ ID NO: 1915 - RNA, 251 nt, Artificial Sequence; identical to SEQ ID NO: 1913
  mRNA product Design i-3 (A100) comprising derived and/or modified sequence from RVA/BE1058/P[4]__AEX30665.1__P2_VP8*(65-223) (opt1)

SEQ ID NO: 1916 - RNA, 251 nt, Artificial Sequence; identical to SEQ ID NO: 1913
  mRNA product Design i-3 (A100) comprising derived and/or modified sequence from RVA/F01322/P[6]__AFA51886.1__P2_VP8*(65-223) (opt1)

SEQ ID NO: 1917 - RNA, 251 nt, Artificial Sequence; identical to SEQ ID NO: 1913
  mRNA product Design i-3 (A100) comprising derived and/or modified sequence from RVA/BE1058/P[4]__AEX30665.1__LumSynt_P2_VP8*(41-223) (opt1)

SEQ ID NO: 1918 - RNA, 251 nt, Artificial Sequence; identical to SEQ ID NO: 1913
  mRNA product Design i-3 (A100) comprising derived and/or modified sequence from RVA/F01322/P[6]__AFA51886.1__LumSynt_P2_VP8*(41-223) (opt1)

SEQ ID NO: 1919 - RNA, 818 nt, Artificial Sequence
  mRNA product Design a-1 (hSL-A100) comprising derived and/or modified sequence from RVA/BE1058/P[4]__AEX30665.1__P2_VP8*(64-223) (opt1) R9247
aggagagucccgcagucggcguccagcggcucugcuuguucgugugugugucguugcaggccuuauucaagcuuaccaugcaguacaucaaggccaacagcaaguucaucggcaucaccgagcugggcagcggguccggcgugcucgacggccccuaccagccgacgaccuucaagccgcccaacgacuacuggcugcugaucuccagcaacaccgacgggguggucuacgaguccaccaacaacagcgacuucuggacggccgugaucgccguggagccccacgucaaccagaccaaccgccaguacguccucuucggcgagaacaagcaguucaacaucgagaacuccagcgacaaguggaaguucuucgagauguucaagggcaacucccagagcgacuucuccaaccggcgcacccugaccagcuccaaccggcugguggggaugcucaaguacggcgggcgcguguggacguuccacggcgagacgccccgggccaccaccgacagcuccagcaccgccgaccugaacaacaucuccaucaucauccacagcgaguucuacaucaucccccgcagccaggaguccaagugcaacgaguacaucaacaacgggcugugaggacuagucccuguucccagagcccacuuuuuuuucuuuuuuugaaauaaaauagccugucuuucagaucucaaaggcucuuuucagagccaccaaaaaaaaaaaaaaaaaaaaaaaaaaaaaaaaaaaaaaaaaaaaaaaaaaaaaaaaaaaaaaaaaaaaaaaaaaaaaaaaaaaaaaaaaaaaaaaaaaaaa

SEQ ID NO: 1920 - RNA, 818 nt, Artificial Sequence
  mRNA product Design a-1 (hSL-A100) comprising derived and/or modified sequence from RVA/F01322/P[6]__AFA51886.1__P2_VP8*(64-223) (opt1) R9246
aggagagucccgcagucggcguccagcggcucugcuuguucgugugugugucguugcaggccuuauucaagcuuaccaugcaguacaucaaggccaacagcaaguucaucggcaucaccgagcugggcagcggguccggcguccucgacgggcccuaccagccgaccaacuucaagccgcccaacgacuacuggauccugcugaaccccaccaaccagcaggucgugcucgagggcacgaacaagaccgacaucuggguggcccugcugcucguggagcccaacgugaccaaccagagccggcaguacacccuguucggggagacgaagcagaucaccgucgagaacaacaccaacaaguggaaguucuucgagauguuccgcuccagcguguccgccgaguuccagcacaagcggacccugacgagcgacaccaagcucgccggcuucaugaaguucuacaacuccguguggaccuuccacggcgagacccccaacgccacgaccgacuacagcuccaccagcaaccuguucgaggucgagaccgugauccacguggaguucuacaucaucccccgcucccaggagagcaagugcuccgaguacaucaacacggggcugugaggacuagucccuguucccagagcccacuuuuuuuucuuuuuuugaaauaaaauagccugucuuucagaucucaaaggcucuuuucagagccaccaaaaaaaaaaaaaaaaaaaaaaaaaaaaaaaaaaaaaaaaaaaaaaaaaaaaaaaaaaaaaaaaaaaaaaaaaaaaaaaaaaaaaaaaaaaaaaaaaaaaa

SEQ ID NO: 1921 - RNA, 815 nt, Artificial Sequence
  mRNA product Design a-1 (hSL-A100) comprising derived and/or modified sequence from RVA/BE1058/P[4]__AEX30665.1__P2_VP8*(65-223) (opt1) R9078
aggagagucccgcagucggcguccagcggcucugcuuguucgugugugugucguugcaggccuuauucaagcuuaccaugcaguacaucaaggccaacagcaaguucaucggcaucaccgagcugggcagcggguccggccucgacggccccuaccagccgacgaccuucaagccgcccaacgacuacuggcugcugaucuccagcaacaccgacgggguggucuacgaguccaccaacaacagcgacuucuggacggccgugaucgccguggagccccacgucaaccagaccaaccgccaguacguccucuucggcgagaacaagcaguucaacaucgagaacuccagcgacaaguggaaguucuucgagauguucaagggcaacucccagagcgacuucuccaaccggcgcacccugaccagcuccaaccggcugguggggaugcucaaguacggcgggcgcguguggacguuccacggcgagacgccccgggccaccaccgacagcuccagcaccgccgaccugaacaacaucuccaucaucauccacagcgaguucuacaucaucccccgcagccaggaguccaagugcaacgaguacaucaacaacgggcugugaggacuagucccuguucccagagcccacuuuuuuuucuuuuuuugaaauaaaauagccugucuuucagaucucaaaggcucuuuucagagccaccaaaaaaaaaaaaaaaaaaaaaaaaaaaaaaaaaaaaaaaaaaaaaaaaaaaaaaaaaaaaaaaaaaaaaaaaaaaaaaaaaaaaaaaaaaaaaaaaaaaaa

SEQ ID NO: 1922 - RNA, 815 nt, Artificial Sequence
  mRNA product Design a-1 (hSL-A100) comprising derived and/or modified sequence from RVA/F01322/P[6]__AFA51886.1__P2_VP8*(65-223) (opt1) R9077
aggagagucccgcagucggcguccagcggcucugcuuguucgugugugugucguugcaggccuuauucaagcuuaccaugcaguacaucaaggccaacagcaaguucaucggcaucaccgagcugggcagcggguccggccucgacgggcccuaccagccgaccaacuucaagccgcccaacgacuacuggauccugcugaaccccaccaaccagcaggucgugcucgagggcacgaacaagaccgacaucuggguggcccugcugcucguggagcccaacgugaccaaccagagccggcaguacacccuguucggggagacgaagcagaucaccgucgagaacaacaccaacaaguggaaguucuucgagauguuccgcuccagcguguccgccgaguuccagcacaagcggacccugacgagcgacaccaagcucgccggcuucaugaaguucuacaacuccguguggaccuuccacggcgagacccccaacgccacgaccgacuacagcuccaccagcaaccuguucgaggucgagaccgugauccacguggaguucuacaucaucccccgcucccaggagagcaagugcuccgaguacaucaacacggggcugugaggacuagucccuguucccagagcccacuuuuuuuucuuuuuuugaaauaaaauagccugucuuucagaucucaaaggcucuuuucagagccaccaaaaaaaaaaaaaaaaaaaaaaaaaaaaaaaaaaaaaaaaaaaaaaaaaaaaaaaaaaaaaaaaaaaaaaaaaaaaaaaaaaaaaaaaaaaaaaaaaaaaa

SEQ ID NO: 1923 - RNA, 1391 nt, Artificial Sequence
  mRNA product Design a-1 (hSL-A100) comprising derived and/or modified sequence from RVA/BE1058/P[4]__AEX30665.1__LumSynt_P2_VP8*(41-223) (opt1) R9092
aggagagucccgcagucggcguccagcggcucugcuuguucgugugugugucguugcaggccuuauucaagcuuaccaugcagaucuacgagggcaagcugaccgccgaggggcuccgcuucggcaucguggccagccgguucaaccacgcgcuggucgaccgccugguggagggggccaucgacgccaucgugcggcacggcgggcgcgaggaggacaucacccucguccgggugcccggcuccugggagaucccgguggccgccggcgagcuggcccgcaaggaggacaucgacgcggucaucgccaucggggugcugauccggggcgccacgccccacuucgacuacaucgccagcgagguguccaaggggcucgcggaccugagccuggagcuccgcaagcccaucaccuucggcgucaucaccgccgacacccuggagcaggccaucgagcgggccgggacgaagcacggcaacaagggcugggaggccgcgcuguccgccaucgagauggccaaccucuucaagagccugcgcggcgggagcggcggguccggcgggagcggcggcuccgggggcgggcaguacaucaaggccaacagcaaguucaucggcaucaccgagcugggcagcggguccggcgcccagacccgguacgcgcccgugaacuggggccacggggagaucaacgacagcaccaccgucgagcccgugcucgacggccccuaccagccgacgaccuucaagccgcccaacgacuacuggcugcugaucuccagcaacaccgacgggguggucuacgaguccaccaacaacagcgacuucuggacggccgugaucgccguggagccccacgucaaccagaccaaccgccaguacguccucuucggcgagaacaagcaguucaacaucgagaacuccagcgacaaguggaaguucuucgagauguucaagggcaacucccagagcgacuucuccaaccggcgcacccugaccagcuccaaccggcugguggggaugcucaaguacggcgggcgcguguggacguuccacggcgagacgccccgggccaccaccgacagcuccagcaccgccgaccugaacaacaucuccaucaucauccacagcgaguucuacaucaucccccgcagccaggaguccaagugcaacgaguacaucaacaacgggcugugaggacuagucccuguucccagagcccacuuuuuuuucuuuuuuugaaauaaaauagccugucuuucagaucucaaaggcucuuuucagagccaccaaaaaaaaaaaaaaaaaaaaaaaaaaaaaaaaaaaaaaaaaaaaaaaaaaaaaaaaaaaaaaaaaaaaaaaaaaaaaaaaaaaaaaaaaaaaaaaaaaaaa

SEQ ID NO: 1924 - RNA, 1391 nt, Artificial Sequence
  mRNA product Design a-1 (hSL-A100) comprising derived and/or modified sequence from RVA/F01322/P[6]__AFA51886.1__LumSynt_P2_VP8*(41-223) (opt1) R9091
aggagagucccgcagucggcguccagcggcucugcuuguucgugugugugucguugcaggccuuauucaagcuuaccaugcagaucuacgagggcaagcugaccgccgaggggcuccgcuucggcaucguggccagccgguucaaccacgcgcuggucgaccgccugguggagggggccaucgacgccaucgugcggcacggcgggcgcgaggaggacaucacccucguccgggugcccggcuccugggagaucccgguggccgccggcgagcuggcccgcaaggaggacaucgacgcggucaucgccaucggggugcugauccggggcgccacgccccacuucgacuacaucgccagcgagguguccaaggggcucgcggaccugagccuggagcuccgcaagcccaucaccuucggcgucaucaccgccgacacccuggagcaggccaucgagcgggccgggacgaagcacggcaacaagggcugggaggccgcgcuguccgccaucgagauggccaaccucuucaagagccugcgcggcgggagcggcggguccggcgggagcggcggcuccgggggcgggcaguacaucaaggccaacagcaaguucaucggcaucaccgagcugggcagcggguccggcgcccagaccaacuacgcgcccgugaccuggagccacggcgaggugaacgacuccacgaccaucgagcccguccucgacgggcccuaccagccgaccaacuucaagccgcccaacgacuacuggauccugcugaaccccaccaaccagcaggucgugcucgagggcacgaacaagaccgacaucuggguggcccugcugcucguggagcccaacgugaccaaccagagccggcaguacacccuguucggggagacgaagcagaucaccgucgagaacaacaccaacaaguggaaguucuucgagauguuccgcuccagcguguccgccgaguuccagcacaagcggacccugacgagcgacaccaagcucgccggcuucaugaaguucuacaacuccguguggaccuuccacggcgagacccccaacgccacgaccgacuacagcuccaccagcaaccuguucgaggucgagaccgugauccacguggaguucuacaucaucccccgcucccaggagagcaagugcuccgaguacaucaacacggggcucugaggacuagucccuguucccagagcccacuuuuuuuucuuuuuuugaaauaaaauagccugucuuucagaucucaaaggcucuuuucagagccaccaaaaaaaaaaaaaaaaaaaaaaaaaaaaaaaaaaaaaaaaaaaaaaaaaaaaaaaaaaaaaaaaaaaaaaaaaaaaaaaaaaaaaaaaaaaaaaaaaaaaa

SEQ ID NO: 1925 - RNA, 759 nt, Artificial Sequence
  mRNA product Design i-3 (hSL-A100) comprising derived and/or modified sequence from RVA/BE1058/P[4]__AEX30665.1__P2_VP8*(64-223) (opt1)
aggagaaagcuuaccaugcaguacaucaaggccaacagcaaguucaucggcaucaccgagcugggcagcggguccggcgugcucgacggccccuaccagccgacgaccuucaagccgcccaacgacuacuggcugcugaucuccagcaacaccgacgggguggucuacgaguccaccaacaacagcgacuucuggacggccgugaucgccguggagccccacgucaaccagaccaaccgccaguacguccucuucggcgagaacaagcaguucaacaucgagaacuccagcgacaaguggaaguucuucgagauguucaagggcaacucccagagcgacuucuccaaccggcgcacccugaccagcuccaaccggcugguggggaugcucaaguacggcgggcgcguguggacguuccacggcgagacgccccgggccaccaccgacagcuccagcaccgccgaccugaacaacaucuccaucaucauccacagcgaguucuacaucaucccccgcagccaggaguccaagugcaacgaguacaucaacaacgggcugugaggacuaguuauaagacugacuagcccgaugggccucccaacgggcccuccuccccuccuugcaccgagauuaaucaaaggcucuuuucagagccaccaaaaaaaaaaaaaaaaaaaaaaaaaaaaaaaaaaaaaaaaaaaaaaaaaaaaaaaaaaaaaaaaaaaaaaaaaaaaaaaaaaaaaaaaaaaaaaaaaaaaa

SEQ ID NO: 1926 - RNA, 759 nt, Artificial Sequence
  mRNA product Design i-3 (hSL-A100) comprising derived and/or modified sequence from RVA/F01322/P[6]__AFA51886.1__P2_VP8*(64-223) (opt1)
aggagaaagcuuaccaugcaguacaucaaggccaacagcaaguucaucggcaucaccgagcugggcagcggguccggcguccucgacgggcccuaccagccgaccaacuucaagccgcccaacgacuacuggauccugcugaaccccaccaaccagcaggucgugcucgagggcacgaacaagaccgacaucuggguggcccugcugcucguggagcccaacgugaccaaccagagccggcaguacacccuguucggggagacgaagcagaucaccgucgagaacaacaccaacaaguggaaguucuucgagauguuccgcuccagcguguccgccgaguuccagcacaagcggacccugacgagcgacaccaagcucgccggcuucaugaaguucuacaacuccguguggaccuuccacggcgagacccccaacgccacgaccgacuacagcuccaccagcaaccuguucgaggucgagaccgugauccacguggaguucuacaucaucccccgcucccaggagagcaagugcuccgaguacaucaacacggggcugugaggacuaguuauaagacugacuagcccgaugggccucccaacgggcccuccuccccuccuugcaccgagauuaaucaaaggcucuuuucagagccaccaaaaaaaaaaaaaaaaaaaaaaaaaaaaaaaaaaaaaaaaaaaaaaaaaaaaaaaaaaaaaaaaaaaaaaaaaaaaaaaaaaaaaaaaaaaaaaaaaaaaa

SEQ ID NO: 1927 - RNA, 756 nt, Artificial Sequence
  mRNA product Design i-3 (hSL-A100) comprising derived and/or modified sequence from RVA/BE1058/P[4]__AEX30665.1__P2_VP8*(65-223) (opt1)
aggagaaagcuuaccaugcaguacaucaaggccaacagcaaguucaucggcaucaccgagcugggcagcggguccggccucgacggccccuaccagccgacgaccuucaagccgcccaacgacuacuggcugcugaucuccagcaacaccgacgggguggucuacgaguccaccaacaacagcgacuucuggacggccgugaucgccguggagccccacgucaaccagaccaaccgccaguacguccucuucggcgagaacaagcaguucaacaucgagaacuccagcgacaaguggaaguucuucgagauguucaagggcaacucccagagcgacuucuccaaccggcgcacccugaccagcuccaaccggcugguggggaugcucaaguacggcgggcgcguguggacguuccacggcgagacgccccgggccaccaccgacagcuccagcaccgccgaccugaacaacaucuccaucaucauccacagcgaguucuacaucaucccccgcagccaggaguccaagugcaacgaguacaucaacaacgggcugugaggacuaguuauaagacugacuagcccgaugggccucccaacgggcccuccuccccuccuugcaccgagauuaaucaaaggcucuuuucagagccaccaaaaaaaaaaaaaaaaaaaaaaaaaaaaaaaaaaaaaaaaaaaaaaaaaaaaaaaaaaaaaaaaaaaaaaaaaaaaaaaaaaaaaaaaaaaaaaaaaaaaa

SEQ ID NO: 1928 - RNA, 756 nt, Artificial Sequence
  mRNA product Design i-3 (hSL-A100) comprising derived and/or modified sequence from RVA/F01322/P[6]__AFA51886.1__P2_VP8*(65-223) (opt1)
aggagaaagcuuaccaugcaguacaucaaggccaacagcaaguucaucggcaucaccgagcugggcagcggguccggccucgacgggcccuaccagccgaccaacuucaagccgcccaacgacuacuggauccugcugaaccccaccaaccagcaggucgugcucgagggcacgaacaagaccgacaucuggguggcccugcugcucguggagcccaacgugaccaaccagagccggcaguacacccuguucggggagacgaagcagaucaccgucgagaacaacaccaacaaguggaaguucuucgagauguuccgcuccagcguguccgccgaguuccagcacaagcggacccugacgagcgacaccaagcucgccggcuucaugaaguucuacaacuccguguggaccuuccacggcgagacccccaacgccacgaccgacuacagcuccaccagcaaccuguucgaggucgagaccgugauccacguggaguucuacaucaucccccgcucccaggagagcaagugcuccgaguacaucaacacggggcugugaggacuaguuauaagacugacuagcccgaugggccucccaacgggcccuccuccccuccuugcaccgagauuaaucaaaggcucuuuucagagccaccaaaaaaaaaaaaaaaaaaaaaaaaaaaaaaaaaaaaaaaaaaaaaaaaaaaaaaaaaaaaaaaaaaaaaaaaaaaaaaaaaaaaaaaaaaaaaaaaaaaaa

SEQ ID NO: 1929 - RNA, 1332 nt, Artificial Sequence
  mRNA product Design i-3 (hSL-A100) comprising derived and/or modified sequence from RVA/BE1058/P[4]__AEX30665.1__LumSynt_P2_VP8*(41-223) (opt1)
aggagaaagcuuaccaugcagaucuacgagggcaagcugaccgccgaggggcuccgcuucggcaucguggccagccgguucaaccacgcgcuggucgaccgccugguggagggggccaucgacgccaucgugcggcacggcgggcgcgaggaggacaucacccucguccgggugcccggcuccugggagaucccgguggccgccggcgagcuggcccgcaaggaggacaucgacgcggucaucgccaucggggugcugauccggggcgccacgccccacuucgacuacaucgccagcgagguguccaaggggcucgcggaccugagccuggagcuccgcaagcccaucaccuucggcgucaucaccgccgacacccuggagcaggccaucgagcgggccgggacgaagcacggcaacaagggcugggaggccgcgcuguccgccaucgagauggccaaccucuucaagagccugcgcggcgggagcggcggguccggcgggagcggcggcuccgggggcgggcaguacaucaaggccaacagcaaguucaucggcaucaccgagcugggcagcggguccggcgcccagacccgguacgcgcccgugaacuggggccacggggagaucaacgacagcaccaccgucgagcccgugcucgacggccccuaccagccgacgaccuucaagccgcccaacgacuacuggcugcugaucuccagcaacaccgacgggguggucuacgaguccaccaacaacagcgacuucuggacggccgugaucgccguggagccccacgucaaccagaccaaccgccaguacguccucuucggcgagaacaagcaguucaacaucgagaacuccagcgacaaguggaaguucuucgagauguucaagggcaacucccagagcgacuucuccaaccggcgcacccugaccagcuccaaccggcugguggggaugcucaaguacggcgggcgcguguggacguuccacggcgagacgccccgggccaccaccgacagcuccagcaccgccgaccugaacaacaucuccaucaucauccacagcgaguucuacaucaucccccgcagccaggaguccaagugcaacgaguacaucaacaacgggcugugaggacuaguuauaagacugacuagcccgaugggccucccaacgggcccuccuccccuccuugcaccgagauuaaucaaaggcucuuuucagagccaccaaaaaaaaaaaaaaaaaaaaaaaaaaaaaaaaaaaaaaaaaaaaaaaaaaaaaaaaaaaaaaaaaaaaaaaaaaaaaaaaaaaaaaaaaaaaaaaaaaaaa

SEQ ID NO: 1930 - RNA, 1332 nt, Artificial Sequence
  mRNA product Design i-3 (hSL-A100) comprising derived and/or modified sequence from RVA/F01322/P[6]__AFA51886.1__LumSynt_P2_VP8*(41-223) (opt1)
aggagaaagcuuaccaugcagaucuacgagggcaagcugaccgccgaggggcuccgcuucggcaucguggccagccgguucaaccacgcgcuggucgaccgccugguggagggggccaucgacgccaucgugcggcacggcgggcgcgaggaggacaucacccucguccgggugcccggcuccugggagaucccgguggccgccggcgagcuggcccgcaaggaggacaucgacgcggucaucgccaucggggugcugauccggggcgccacgccccacuucgacuacaucgccagcgagguguccaaggggcucgcggaccugagccuggagcuccgcaagcccaucaccuucggcgucaucaccgccgacacccuggagcaggccaucgagcgggccgggacgaagcacggcaacaagggcugggaggccgcgcuguccgccaucgagauggccaaccucuucaagagccugcgcggcgggagcggcggguccggcgggagcggcggcuccgggggcgggcaguacaucaaggccaacagcaaguucaucggcaucaccgagcugggcagcggguccggcgcccagaccaacuacgcgcccgugaccuggagccacggcgaggugaacgacuccacgaccaucgagcccguccucgacgggcccuaccagccgaccaacuucaagccgcccaacgacuacuggauccugcugaaccccaccaaccagcaggucgugcucgagggcacgaacaagaccgacaucuggguggcccugcugcucguggagcccaacgugaccaaccagagccggcaguacacccuguucggggagacgaagcagaucaccgucgagaacaacaccaacaaguggaaguucuucgagauguuccgcuccagcguguccgccgaguuccagcacaagcggacccugacgagcgacaccaagcucgccggcuucaugaaguucuacaacuccguguggaccuuccacggcgagacccccaacgccacgaccgacuacagcuccaccagcaaccuguucgaggucgagaccgugauccacguggaguucuacaucaucccccgcucccaggagagcaagugcuccgaguacaucaacacggggcucugaggacuaguuauaagacugacuagcccgaugggccucccaacgggcccuccuccccuccuugcaccgagauuaaucaaaggcucuuuucagagccaccaaaaaaaaaaaaaaaaaaaaaaaaaaaaaaaaaaaaaaaaaaaaaaaaaaaaaaaaaaaaaaaaaaaaaaaaaaaaaaaaaaaaaaaaaaaaaaaaaaaaa
